United States Patent Application Publication US 2023/0087228 A1 - sequence listing, part 11

SEQ ID NO: 1016 - DNA, 105128 bp, Artificial Sequence
  Synthetic Oligonucleotide
  misc_feature (1)..(92589): n is a, c, g, or t
  misc_feature (103661)..(103717): n is a, c, g, or t
nnnnnnnnnnnnnnnnnnnnnnnnnnnnnnnnnnnnnnnnnnnnnnnnnnnnnnnnnnnnnnnnnnnnnnnnnnnnnnnnnnnnnnnnnnnnnnnnnnnnnnnnnnnnnnnnnnnnnnnnnnnnnnnnnnnnnnnnnnnnnnnnnnnnnnnnnnnnnnnnnnnnnnnnnnnnnnnnnnnnnnnnnnnnnnnnnnnnnnnnnnnnnnnnnnnnnnnnnnnnnnnnnnnnnnnnnnnnnnnnnnnnnnnnnnnnnnnnnnnnnnnnnnnnnnnnnnnnnnnnnnnnnnnnnnnnnnnnnnnnnnnnnnnnnnnnnnnnnnnnnnnnnnnnnnnnnnnnnnnnnnnnnnnnnnnnnnnnnnnnnnnnnnnnnnnnnnnnnnnnnnnnnnnnnnnnnnnnnnnnnnnnnnnnnnnnnnnnnnnnnnnnnnnnnnnnnnnnnnnnnnnnnnnnnnnnnnnnnnnnnnnnnnnnnnnnnnnnnnnnnnnnnnnnnnnnnnnnnnnnnnnnnnnnnnnnnnnnnnnnnnnnnnnnnnnnnnnnnnnnnnnnnnnnnnnnnnnnnnnnnnnnnnnnnnnnnnnnnnnnnnnnnnnnnnnnnnnnnnnnnnnnnnnnnnnnnnnnnnnnnnnnnnnnnnnnnnnnnnnnnnnnnnnnnnnnnnnnnnnnnnnnnnnnnnnnnnnnnnnnnnnnnnnnnnnnnnnnnnnnnnnnnnnnnnnnnnnnnnnnnnnnnnnnnnnnnnnnnnnnnnnnnnnnnnnnnnnnnnnnnnnnnnnnnnnnnnnnnnnnnnnnnnnnnnnnnnnnnnnnnnnnnnnnnnnnnnnnnnnnnnnnnnnnnnnnnnnnnnnnnnnnnnnnnnnnnnnnnnnnnnnnnnnnnnnnnnnnnnnnnnnnnnnnnnnnnnnnnnnnnnnnnnnnnnnnnnnnnnnnnnnnnnnnnnnnnnnnnnnnnnnnnnnnnnnnnnnnnnnnnnnnnnnnnnnnnnnnnnnnnnnnnnnnnnnnnnnnnnnnnnnnnnnnnnnnnnnnnnnnnnnnnnnnnnnnnnnnnnnnnnnnnnnnnnnnnnnnnnnnnnnnnnnnnnnnnnnnnnnnnnnnnnnnnnnnnnnnnnnnnnnnnnnnnnnnnnnnnnnnnnnnnnnnnnnnnnnnnnnnnnnnnnnnnnnnnnnnnnnnnnnnnnnnnnnnnnnnnnnnnnnnnnnnnnnnnnnnnnnnnnnnnnnnnnnnnnnnnnnnnnnnnnnnnnnnnnnnnnnnnnnnnnnnnnnnnnnnnnnnnnnnnnnnnnnnnnnnnnnnnnnnnnnnnnnnnnnnnnnnnnnnnnnnnnnnnnnnnnnnnnnnnnnnnnnnnnnnnnnnnnnnnnnnnnnnnnnnnnnnnnnnnnnnnnnnnnnnnnnnnnnnnnnnnnnnnnnnnnnnnnnnnnnnnnnnnnnnnnnnnnnnnnnnnnnnnnnnnnnnnnnnnnnnnnnnnnnnnnnnnnnnnnnnnnnnnnnnnnnnnnnnnnnnnnnnnnnnnnnnnnnnnnnnnnnnnnnnnnnnnnnnnnnnnnnnnnnnnnnnnnnnnnnnnnnnnnnnnnnnnnnnnnnnnnnnnnnnnnnnnnnnnnnnnnnnnnnnnnnnnnnnnnnnnnnnnnnnnnnnnnnnnnnnnnnnnnnnnnnnnnnnnnnnnnnnnnnnnnnnnnnnnnnnnnnnnnnnnnnnnnnnnnnnnnnnnnnnnnnnnnnnnnnnnnnnnnnnnnnnnnnnnnnnnnnnnnnnnnnnnnnnnnnnnnnnnnnnnnnnnnnnnnnnnnnnnnnnnnnnnnnnnnnnnnnnnnnnnnnnnnnnnnnnnnnnnnnnnnnnnnnnnnnnnnnnnnnnnnnnnnnnnnnnnnnnnnnnnnnnnnnnnnnnnnnnnnnnnnnnnnnnnnnnnnnnnnnnnnnnnnnnnnnnnnnnnnnnnnnnnnnnnnnnnnnnnnnnnnnnnnnnnnnnnnnnnnnnnnnnnnnnnnnnnnnnnnnnnnnnnnnnnnnnnnnnnnnnnnnnnnnnnnnnnnnnnnnnnnnnnnnnnnnnnnnnnnnnnnnnnnnnnnnnnnnnnnnnnnnnnnnnnnnnnnnnnnnnnnnnnnnnnnnnnnnnnnnnnnnnnnnnnnnnnnnnnnnnnnnnnnnnnnnnnnnnnnnnnnnnnnnnnnnnnnnnnnnnnnnnnnnnnnnnnnnnnnnnnnnnnnnnnnnnnnnnnnnnnnnnnnnnnnnnnnnnnnnnnnnnnnnnnnnnnnnnnnnnnnnnnnnnnnnnnnnnnnnnnnnnnnnnnnnnnnnnnnnnnnnnnnnnnnnnnnnnnnnnnnnnnnnnnnnnnnnnnnnnnnnnnnnnnnnnnnnnnnnnnnnnnnnnnnnnnnnnnnnnnnnnnnnnnnnnnnnnnnnnnnnnnnnnnnnnnnnnnnnnnnnnnnnnnnnnnnnnnnnnnnnnnnnnnnnnnnnnnnnnnnnnnnnnnnnnnnnnnnnnnnnnnnnnnnnnnnnnnnnnnnnnnnnnnnnnnnnnnnnnnnnnnnnnnnnnnnnnnnnnnnnnnnnnnnnnnnnnnnnnnnnnnnnnnnnnnnnnnnnnnnnnnnnnnnnnnnnnnnnnnnnnnnnnnnnnnnnnnnnnnnnnnnnnnnnnnnnnnnnnnnnnnnnnnnnnnnnnnnnnnnnnnnnnnnnnnnnnnnnnnnnnnnnnnnnnnnnnnnnnnnnnnnnnnnnnnnnnnnnnnnnnnnnnnnnnnnnnnnnnnnnnnnnnnnnnnnnnnnnnnnnnnnnnnnnnnnnnnnnnnnnnnnnnnnnnnnnnnnnnnnnnnnnnnnnnnnnnnnnnnnnnnnnnnnnnnnnnnnnnnnnnnnnnnnnnnnnnnnnnnnnnnnnnnnnnnnnnnnnnnnnnnnnnnnnnnnnnnnnnnnnnnnnnnnnnnnnnnnnnnnnnnnnnnnnnnnnnnnnnnnnnnnnnnnnnnnnnnnnnnnnnnnnnnnnnnnnnnnnnnnnnnnnnnnnnnnnnnnnnnnnnnnnnnnnnnnnnnnnnnnnnnnnnnnnnnnnnnnnnnnnnnnnnnnnnnnnnnnnnnnnnnnnnnnnnnnnnnnnnnnnnnnnnnnnnnnnnnnnnnnnnnnnnnnnnnnnnnnnnnnnnnnnnnnnnnnnnnnnnnnnnnnnnnnnnnnnnnnnnnnnnnnnnnnnnnnnnnnnnnnnnnnnnnnnnnnnnnnnnnnnnnnnnnnnnnnnnnnnnnnnnnnnnnnnnnnnnnnnnnnnnnnnnnnnnnnnnnnnnnnnnnnnnnnnnnnnnnnnnnnnnnnnnnnnnnnnnnnnnnnnnnnnnnnnnnnnnnnnnnnnnnnnnnnnnnnnnnnnnnnnnnnnnnnnnnnnnnnnnnnnnnnnnnnnnnnnnnnnnnnnnnnnnnnnnnnnnnnnnnnnnnnnnnnnnnnnnnnnnnnnnnnnnnnnnnnnnnnnnnnnnnnnnnnnnnnnnnnnnnnnnnnnnnnnnnnnnnnnnnnnnnnnnnnnnnnnnnnnnnnnnnnnnnnnnnnnnnnnnnnnnnnnnnnnnnnnnnnnnnnnnnnnnnnnnnnnnnnnnnnnnnnnnnnnnnnnnnnnnnnnnnnnnnnnnnnnnnnnnnnnnnnnnnnnnnnnnnnnnnnnnnnnnnnnnnnnnnnnnnnnnnnnnnnnnnnnnnnnnnnnnnnnnnnnnnnnnnnnnnnnnnnnnnnnnnnnnnnnnnnnnnnnnnnnnnnnnnnnnnnnnnnnnnnnnnnnnnnnnnnnnnnnnnnnnnnnnnnnnnnnnnnnnnnnnnnnnnnnnnnnnnnnnnnnnnnnnnnnnnnnnnnnnnnnnnnnnnnnnnnnnnnnnnnnnnnnnnnnnnnnnnnnnnnnnnnnnnnnnnnnnnnnnnnnnnnnnnnnnnnnnnnnnnnnnnnnnnnnnnnnnnnnnnnnnnnnnnnnnnnnnnnnnnnnnnnnnnnnnnnnnnnnnnnnnnnnnnnnnnnnnnnnnnnnnnnnnnnnnnnnnnnnnnnnnnnnnnnnnnnnnnnnnnnnnnnnnnnnnnnnnnnnnnnnnnnnnnnnnnnnnnnnnnnnnnnnnnnnnnnnnnnnnnnnnnnnnnnnnnnnnnnnnnnnnnnnnnnnnnnnnnnnnnnnnnnnnnnnnnnnnnnnnnnnnnnnnnnnnnnnnnnnnnnnnnnnnnnnnnnnnnnnnnnnnnnnnnnnnnnnnnnnnnnnnnnnnnnnnnnnnnnnnnnnnnnnnnnnnnnnnnnnnnnnnnnnnnnnnnnnnnnnnnnnnnnnnnnnnnnnnnnnnnnnnnnnnnnnnnnnnnnnnnnnnnnnnnnnnnnnnnnnnnnnnnnnnnnnnnnnnnnnnnnnnnnnnnnnnnnnnnnnnnnnnnnnnnnnnnnnnnnnnnnnnnnnnnnnnnnnnnnnnnnnnnnnnnnnnnnnnnnnnnnnnnnnnnnnnnnnnnnnnnnnnnnnnnnnnnnnnnnnnnnnnnnnnnnnnnnnnnnnnnnnnnnnnnnnnnnnnnnnnnnnnnnnnnnnnnnnnnnnnnnnnnnnnnnnnnnnnnnnnnnnnnnnnnnnnnnnnnnnnnnnnnnnnnnnnnnnnnnnnnnnnnnnnnnnnnnnnnnnnnnnnnnnnnnnnnnnnnnnnnnnnnnnnnnnnnnnnnnnnnnnnnnnnnnnnnnnnnnnnnnnnnnnnnnnnnnnnnnnnnnnnnnnnnnnnnnnnnnnnnnnnnnnnnnnnnnnnnnnnnnnnnnnnnnnnnnnnnnnnnnnnnnnnnnnnnnnnnnnnnnnnnnnnnnnnnnnnnnnnnnnnnnnnnnnnnnnnnnnnnnnnnnnnnnnnnnnnnnnnnnnnnnnnnnnnnnnnnnnnnnnnnnnnnnnnnnnnnnnnnnnnnnnnnnnnnnnnnnnnnnnnnnnnnnnnnnnnnnnnnnnnnnnnnnnnnnnnnnnnnnnnnnnnnnnnnnnnnnnnnnnnnnnnnnnnnnnnnnnnnnnnnnnnnnnnnnnnnnnnnnnnnnnnnnnnnnnnnnnnnnnnnnnnnnnnnnnnnnnnnnnnnnnnnnnnnnnnnnnnnnnnnnnnnnnnnnnnnnnnnnnnnnnnnnnnnnnnnnnnnnnnnnnnnnnnnnnnnnnnnnnnnnnnnnnnnnnnnnnnnnnnnnnnnnnnnnnnnnnnnnnnnnnnnnnnnnnnnnnnnnnnnnnnnnnnnnnnnnnnnnnnnnnnnnnnnnnnnnnnnnnnnnnnnnnnnnnnnnnnnnnnnnnnnnnnnnnnnnnnnnnnnnnnnnnnnnnnnnnnnnnnnnnnnnnnnnnnnnnnnnnnnnnnnnnnnnnnnnnnnnnnnnnnnnnnnnnnnnnnnnnnnnnnnnnnnnnnnnnnnnnnnnnnnnnnnnnnnnnnnnnnnnnnnnnnnnnnnnnnnnnnnnnnnnnnnnnnnnnnnnnnnnnnnnnnnnnnnnnnnnnnnnnnnnnnnnnnnnnnnnnnnnnnnnnnnnnnnnnnnnnnnnnnnnnnnnnnnnnnnnnnnnnnnnnnnnnnnnnnnnnnnnnnnnnnnnnnnnnnnnnnnnnnnnnnnnnnnnnnnnnnnnnnnnnnnnnnnnnnnnnnnnnnnnnnnnnnnnnnnnnnnnnnnnnnnnnnnnnnnnnnnnnnnnnnnnnnnnnnnnnnnnnnnnnnnnnnnnnnnnnnnnnnnnnnnnnnnnnnnnnnnnnnnnnnnnnnnnnnnnnnnnnnnnnnnnnnnnnnnnnnnnnnnnnnnnnnnnnnnnnnnnnnnnnnnnnnnnnnnnnnnnnnnnnnnnnnnnnnnnnnnnnnnnnnnnnnnnnnnnnnnnnnnnnnnnnnnnnnnnnnnnnnnnnnnnnnnnnnnnnnnnnnnnnnnnnnnnnnnnnnnnnnnnnnnnnnnnnnnnnnnnnnnnnnnnnnnnnnnnnnnnnnnnnnnnnnnnnnnnnnnnnnnnnnnnnnnnnnnnnnnnnnnnnnnnnnnnnnnnnnnnnnnnnnnnnnnnnnnnnnnnnnnnnnnnnnnnnnnnnnnnnnnnnnnnnnnnnnnnnnnnnnnnnnnnnnnnnnnnnnnnnnnnnnnnnnnnnnnnnnnnnnnnnnnnnnnnnnnnnnnnnnnnnnnnnnnnnnnnnnnnnnnnnnnnnnnnnnnnnnnnnnnnnnnnnnnnnnnnnnnnnnnnnnnnnnnnnnnnnnnnnnnnnnnnnnnnnnnnnnnnnnnnnnnnnnnnnnnnnnnnnnnnnnnnnnnnnnnnnnnnnnnnnnnnnnnnnnnnnnnnnnnnnnnnnnnnnnnnnnnnnnnnnnnnnnnnnnnnnnnnnnnnnnnnnnnnnnnnnnnnnnnnnnnnnnnnnnnnnnnnnnnnnnnnnnnnnnnnnnnnnnnnnnnnnnnnnnnnnnnnnnnnnnnnnnnnnnnnnnnnnnnnnnnnnnnnnnnnnnnnnnnnnnnnnnnnnnnnnnnnnnnnnnnnnnnnnnnnnnnnnnnnnnnnnnnnnnnnnnnnnnnnnnnnnnnnnnnnnnnnnnnnnnnnnnnnnnnnnnnnnnnnnnnnnnnnnnnnnnnnnnnnnnnnnnnnnnnnnnnnnnnnnnnnnnnnnnnnnnnnnnnnnnnnnnnnnnnnnnnnnnnnnnnnnnnnnnnnnnnnnnnnnnnnnnnnnnnnnnnnnnnnnnnnnnnnnnnnnnnnnnnnnnnnnnnnnnnnnnnnnnnnnnnnnnnnnnnnnnnnnnnnnnnnnnnnnnnnnnnnnnnnnnnnnnnnnnnnnnnnnnnnnnnnnnnnnnnnnnnnnnnnnnnnnnnnnnnnnnnnnnnnnnnnnnnnnnnnnnnnnnnnnnnnnnnnnnnnnnnnnnnnnnnnnnnnnnnnnnnnnnnnnnnnnnnnnnnnnnnnnnnnnnnnnnnnnnnnnnnnnnnnnnnnnnnnnnnnnnnnnnnnnnnnnnnnnnnnnnnnnnnnnnnnnnnnnnnnnnnnnnnnnnnnnnnnnnnnnnnnnnnnnnnnnnnnnnnnnnnnnnnnnnnnnnnnnnnnnnnnnnnnnnnnnnnnnnnnnnnnnnnnnnnnnnnnnnnnnnnnnnnnnnnnnnnnnnnnnnnnnnnnnnnnnnnnnnnnnnnnnnnnnnnnnnnnnnnnnnnnnnnnnnnnnnnnnnnnnnnnnnnnnnnnnnnnnnnnnnnnnnnnnnnnnnnnnnnnnnnnnnnnnnnnnnnnnnnnnnnnnnnnnnnnnnnnnnnnnnnnnnnnnnnnnnnnnnnnnnnnnnnnnnnnnnnnnnnnnnnnnnnnnnnnnnnnnnnnnnnnnnnnnnnnnnnnnnnnnnnnnnnnnnnnnnnnnnnnnnnnnnnnnnnnnnnnnnnnnnnnnnnnnnnnnnnnnnnnnnnnnnnnnnnnnnnnnnnnnnnnnnnnnnnnnnnnnnnnnnnnnnnnnnnnnnnnnnnnnnnnnnnnnnnnnnnnnnnnnnnnnnnnnnnnnnnnnnnnnnnnnnnnnnnnnnnnnnnnnnnnnnnnnnnnnnnnnnnnnnnnnnnnnnnnnnnnnnnnnnnnnnnnnnnnnnnnnnnnnnnnnnnnnnnnnnnnnnnnnnnnnnnnnnnnnnnnnnnnnnnnnnnnnnnnnnnnnnnnnnnnnnnnnnnnnnnnnnnnnnnnnnnnnnnnnnnnnnnnnnnnnnnnnnnnnnnnnnnnnnnnnnnnnnnnnnnnnnnnnnnnnnnnnnnnnnnnnnnnnnnnnnnnnnnnnnnnnnnnnnnnnnnnnnnnnnnnnnnnnnnnnnnnnnnnnnnnnnnnnnnnnnnnnnnnnnnnnnnnnnnnnnnnnnnnnnnnnnnnnnnnnnnnnnnnnnnnnnnnnnnnnnnnnnnnnnnnnnnnnnnnnnnnnnnnnnnnnnnnnnnnnnnnnnnnnnnnnnnnnnnnnnnnnnnnnnnnnnnnnnnnnnnnnnnnnnnnnnnnnnnnnnnnnnnnnnnnnnnnnnnnnnnnnnnnnnnnnnnnnnnnnnnnnnnnnnnnnnnnnnnnnnnnnnnnnnnnnnnnnnnnnnnnnnnnnnnnnnnnnnnnnnnnnnnnnnnnnnnnnnnnnnnnnnnnnnnnnnnnnnnnnnnnnnnnnnnnnnnnnnnnnnnnnnnnnnnnnnnnnnnnnnnnnnnnnnnnnnnnnnnnnnnnnnnnnnnnnnnnnnnnnnnnnnnnnnnnnnnnnnnnnnnnnnnnnnnnnnnnnnnnnnnnnnnnnnnnnnnnnnnnnnnnnnnnnnnnnnnnnnnnnnnnnnnnnnnnnnnnnnnnnnnnnnnnnnnnnnnnnnnnnnnnnnnnnnnnnnnnnnnnnnnnnnnnnnnnnnnnnnnnnnnnnnnnnnnnnnnnnnnnnnnnnnnnnnnnnnnnnnnnnnnnnnnnnnnnnnnnnnnnnnnnnnnnnnnnnnnnnnnnnnnnnnnnnnnnnnnnnnnnnnnnnnnnnnnnnnnnnnnnnnnnnnnnnnnnnnnnnnnnnnnnnnnnnnnnnnnnnnnnnnnnnnnnnnnnnnnnnnnnnnnnnnnnnnnnnnnnnnnnnnnnnnnnnnnnnnnnnnnnnnnnnnnnnnnnnnnnnnnnnnnnnnnnnnnnnnnnnnnnnnnnnnnnnnnnnnnnnnnnnnnnnnnnnnnnnnnnnnnnnnnnnnnnnnnnnnnnnnnnnnnnnnnnnnnnnnnnnnnnnnnnnnnnnnnnnnnnnnnnnnnnnnnnnnnnnnnnnnnnnnnnnnnnnnnnnnnnnnnnnnnnnnnnnnnnnnnnnnnnnnnnnnnnnnnnnnnnnnnnnnnnnnnnnnnnnnnnnnnnnnnnnnnnnnnnnnnnnnnnnnnnnnnnnnnnnnnnnnnnnnnnnnnnnnnnnnnnnnnnnnnnnnnnnnnnnnnnnnnnnnnnnnnnnnnnnnnnnnnnnnnnnnnnnnnnnnnnnnnnnnnnnnnnnnnnnnnnnnnnnnnnnnnnnnnnnnnnnnnnnnnnnnnnnnnnnnnnnnnnnnnnnnnnnnnnnnnnnnnnnnnnnnnnnnnnnnnnnnnnnnnnnnnnnnnnnnnnnnnnnnnnnnnnnnnnnnnnnnnnnnnnnnnnnnnnnnnnnnnnnnnnnnnnnnnnnnnnnnnnnnnnnnnnnnnnnnnnnnnnnnnnnnnnnnnnnnnnnnnnnnnnnnnnnnnnnnnnnnnnnnnnnnnnnnnnnnnnnnnnnnnnnnnnnnnnnnnnnnnnnnnnnnnnnnnnnnnnnnnnnnnnnnnnnnnnnnnnnnnnnnnnnnnnnnnnnnnnnnnnnnnnnnnnnnnnnnnnnnnnnnnnnnnnnnnnnnnnnnnnnnnnnnnnnnnnnnnnnnnnnnnnnnnnnnnnnnnnnnnnnnnnnnnnnnnnnnnnnnnnnnnnnnnnnnnnnnnnnnnnnnnnnnnnnnnnnnnnnnnnnnnnnnnnnnnnnnnnnnnnnnnnnnnnnnnnnnnnnnnnnnnnnnnnnnnnnnnnnnnnnnnnnnnnnnnnnnnnnnnnnnnnnnnnnnnnnnnnnnnnnnnnnnnnnnnnnnnnnnnnnnnnnnnnnnnnnnnnnnnnnnnnnnnnnnnnnnnnnnnnnnnnnnnnnnnnnnnnnnnnnnnnnnnnnnnnnnnnnnnnnnnnnnnnnnnnnnnnnnnnnnnnnnnnnnnnnnnnnnnnnnnnnnnnnnnnnnnnnnnnnnnnnnnnnnnnnnnnnnnnnnnnnnnnnnnnnnnnnnnnnnnnnnnnnnnnnnnnnnnnnnnnnnnnnnnnnnnnnnnnnnnnnnnnnnnnnnnnnnnnnnnnnnnnnnnnnnnnnnnnnnnnnnnnnnnnnnnnnnnnnnnnnnnnnnnnnnnnnnnnnnnnnnnnnnnnnnnnnnnnnnnnnnnnnnnnnnnnnnnnnnnnnnnnnnnnnnnnnnnnnnnnnnnnnnnnnnnnnnnnnnnnnnnnnnnnnnnnnnnnnnnnnnnnnnnnnnnnnnnnnnnnnnnnnnnnnnnnnnnnnnnnnnnnnnnnnnnnnnnnnnnnnnnnnnnnnnnnnnnnnnnnnnnnnnnnnnnnnnnnnnnnnnnnnnnnnnnnnnnnnnnnnnnnnnnnnnnnnnnnnnnnnnnnnnnnnnnnnnnnnnnnnnnnnnnnnnnnnnnnnnnnnnnnnnnnnnnnnnnnnnnnnnnnnnnnnnnnnnnnnnnnnnnnnnnnnnnnnnnnnnnnnnnnnnnnnnnnnnnnnnnnnnnnnnnnnnnnnnnnnnnnnnnnnnnnnnnnnnnnnnnnnnnnnnnnnnnnnnnnnnnnnnnnnnnnnnnnnnnnnnnnnnnnnnnnnnnnnnnnnnnnnnnnnnnnnnnnnnnnnnnnnnnnnnnnnnnnnnnnnnnnnnnnnnnnnnnnnnnnnnnnnnnnnnnnnnnnnnnnnnnnnnnnnnnnnnnnnnnnnnnnnnnnnnnnnnnnnnnnnnnnnnnnnnnnnnnnnnnnnnnnnnnnnnnnnnnnnnnnnnnnnnnnnnnnnnnnnnnnnnnnnnnnnnnnnnnnnnnnnnnnnnnnnnnnnnnnnnnnnnnnnnnnnnnnnnnnnnnnnnnnnnnnnnnnnnnnnnnnnnnnnnnnnnnnnnnnnnnnnnnnnnnnnnnnnnnnnnnnnnnnnnnnnnnnnnnnnnnnnnnnnnnnnnnnnnnnnnnnnnnnnnnnnnnnnnnnnnnnnnnnnnnnnnnnnnnnnnnnnnnnnnnnnnnnnnnnnnnnnnnnnnnnnnnnnnnnnnnnnnnnnnnnnnnnnnnnnnnnnnnnnnnnnnnnnnnnnnnnnnnnnnnnnnnnnnnnnnnnnnnnnnnnnnnnnnnnnnnnnnnnnnnnnnnnnnnnnnnnnnnnnnnnnnnnnnnnnnnnnnnnnnnnnnnnnnnnnnnnnnnnnnnnnnnnnnnnnnnnnnnnnnnnnnnnnnnnnnnnnnnnnnnnnnnnnnnnnnnnnnnnnnnnnnnnnnnnnnnnnnnnnnnnnnnnnnnnnnnnnnnnnnnnnnnnnnnnnnnnnnnnnnnnnnnnnnnnnnnnnnnnnnnnnnnnnnnnnnnnnnnnnnnnnnnnnnnnnnnnnnnnnnnnnnnnnnnnnnnnnnnnnnnnnnnnnnnnnnnnnnnnnnnnnnnnnnnnnnnnnnnnnnnnnnnnnnnnnnnnnnnnnnnnnnnnnnnnnnnnnnnnnnnnnnnnnnnnnnnnnnnnnnnnnnnnnnnnnnnnnnnnnnnnnnnnnnnnnnnnnnnnnnnnnnnnnnnnnnnnnnnnnnnnnnnnnnnnnnnnnnnnnnnnnnnnnnnnnnnnnnnnnnnnnnnnnnnnnnnnnnnnnnnnnnnnnnnnnnnnnnnnnnnnnnnnnnnnnnnnnnnnnnnnnnnnnnnnnnnnnnnnnnnnnnnnnnnnnnnnnnnnnnnnnnnnnnnnnnnnnnnnnnnnnnnnnnnnnnnnnnnnnnnnnnnnnnnnnnnnnnnnnnnnnnnnnnnnnnnnnnnnnnnnnnnnnnnnnnnnnnnnnnnnnnnnnnnnnnnnnnnnnnnnnnnnnnnnnnnnnnnnnnnnnnnnnnnnnnnnnnnnnnnnnnnnnnnnnnnnnnnnnnnnnnnnnnnnnnnnnnnnnnnnnnnnnnnnnnnnnnnnnnnnnnnnnnnnnnnnnnnnnnnnnnnnnnnnnnnnnnnnnnnnnnnnnnnnnnnnnnnnnnnnnnnnnnnnnnnnnnnnnnnnnnnnnnnnnnnnnnnnnnnnnnnnnnnnnnnnnnnnnnnnnnnnnnnnnnnnnnnnnnnnnnnnnnnnnnnnnnnnnnnnnnnnnnnnnnnnnnnnnnnnnnnnnnnnnnnnnnnnnnnnnnnnnnnnnnnnnnnnnnnnnnnnnnnnnnnnnnnnnnnnnnnnnnnnnnnnnnnnnnnnnnnnnnnnnnnnnnnnnnnnnnnnnnnnnnnnnnnnnnnnnnnnnnnnnnnnnnnnnnnnnnnnnnnnnnnnnnnnnnnnnnnnnnnnnnnnnnnnnnnnnnnnnnnnnnnnnnnnnnnnnnnnnnnnnnnnnnnnnnnnnnnnnnnnnnnnnnnnnnnnnnnnnnnnnnnnnnnnnnnnnnnnnnnnnnnnnnnnnnnnnnnnnnnnnnnnnnnnnnnnnnnnnnnnnnnnnnnnnnnnnnnnnnnnnnnnnnnnnnnnnnnnnnnnnnnnnnnnnnnnnnnnnnnnnnnnnnnnnnnnnnnnnnnnnnnnnnnnnnnnnnnnnnnnnnnnnnnnnnnnnnnnnnnnnnnnnnnnnnnnnnnnnnnnnnnnnnnnnnnnnnnnnnnnnnnnnnnnnnnnnnnnnnnnnnnnnnnnnnnnnnnnnnnnnnnnnnnnnnnnnnnnnnnnnnnnnnnnnnnnnnnnnnnnnnnnnnnnnnnnnnnnnnnnnnnnnnnnnnnnnnnnnnnnnnnnnnnnnnnnnnnnnnnnnnnnnnnnnnnnnnnnnnnnnnnnnnnnnnnnnnnnnnnnnnnnnnnnnnnnnnnnnnnnnnnnnnnnnnnnnnnnnnnnnnnnnnnnnnnnnnnnnnnnnnnnnnnnnnnnnnnnnnnnnnnnnnnnnnnnnnnnnnnnnnnnnnnnnnnnnnnnnnnnnnnnnnnnnnnnnnnnnnnnnnnnnnnnnnnnnnnnnnnnnnnnnnnnnnnnnnnnnnnnnnnnnnnnnnnnnnnnnnnnnnnnnnnnnnnnnnnnnnnnnnnnnnnnnnnnnnnnnnnnnnnnnnnnnnnnnnnnnnnnnnnnnnnnnnnnnnnnnnnnnnnnnnnnnnnnnnnnnnnnnnnnnnnnnnnnnnnnnnnnnnnnnnnnnnnnnnnnnnnnnnnnnnnnnnnnnnnnnnnnnnnnnnnnnnnnnnnnnnnnnnnnnnnnnnnnnnnnnnnnnnnnnnnnnnnnnnnnnnnnnnnnnnnnnnnnnnnnnnnnnnnnnnnnnnnnnnnnnnnnnnnnnnnnnnnnnnnnnnnnnnnnnnnnnnnnnnnnnnnnnnnnnnnnnnnnnnnnnnnnnnnnnnnnnnnnnnnnnnnnnnnnnnnnnnnnnnnnnnnnnnnnnnnnnnnnnnnnnnnnnnnnnnnnnnnnnnnnnnnnnnnnnnnnnnnnnnnnnnnnnnnnnnnnnnnnnnnnnnnnnnnnnnnnnnnnnnnnnnnnnnnnnnnnnnnnnnnnnnnnnnnnnnnnnnnnnnnnnnnnnnnnnnnnnnnnnnnnnnnnnnnnnnnnnnnnnnnnnnnnnnnnnnnnnnnnnnnnnnnnnnnnnnnnnnnnnnnnnnnnnnnnnnnnnnnnnnnnnnnnnnnnnnnnnnnnnnnnnnnnnnnnnnnnnnnnnnnnnnnnnnnnnnnnnnnnnnnnnnnnnnnnnnnnnnnnnnnnnnnnnnnnnnnnnnnnnnnnnnnnnnnnnnnnnnnnnnnnnnnnnnnnnnnnnnnnnnnnnnnnnnnnnnnnnnnnnnnnnnnnnnnnnnnnnnnnnnnnnnnnnnnnnnnnnnnnnnnnnnnnnnnnnnnnnnnnnnnnnnnnnnnnnnnnnnnnnnnnnnnnnnnnnnnnnnnnnnnnnnnnnnnnnnnnnnnnnnnnnnnnnnnnnnnnnnnnnnnnnnnnnnnnnnnnnnnnnnnnnnnnnnnnnnnnnnnnnnnnnnnnnnnnnnnnnnnnnnnnnnnnnnnnnnnnnnnnnnnnnnnnnnnnnnnnnnnnnnnnnnnnnnnnnnnnnnnnnnnnnnnnnnnnnnnnnnnnnnnnnnnnnnnnnnnnnnnnnnnnnnnnnnnnnnnnnnnnnnnnnnnnnnnnnnnnnnnnnnnnnnnnnnnnnnnnnnnnnnnnnnnnnnnnnnnnnnnnnnnnnnnnnnnnnnnnnnnnnnnnnnnnnnnnnnnnnnnnnnnnnnnnnnnnnnnnnnnnnnnnnnnnnnnnnnnnnnnnnnnnnnnnnnnnnnnnnnnnnnnnnnnnnnnnnnnnnnnnnnnnnnnnnnnnnnnnnnnnnnnnnnnnnnnnnnnnnnnnnnnnnnnnnnnnnnnnnnnnnnnnnnnnnnnnnnnnnnnnnnnnnnnnnnnnnnnnnnnnnnnnnnnnnnnnnnnnnnnnnnnnnnnnnnnnnnnnnnnnnnnnnnnnnnnnnnnnnnnnnnnnnnnnnnnnnnnnnnnnnnnnnnnnnnnnnnnnnnnnnnnnnnnnnnnnnnnnnnnnnnnnnnnnnnnnnnnnnnnnnnnnnnnnnnnnnnnnnnnnnnnnnnnnnnnnnnnnnnnnnnnnnnnnnnnnnnnnnnnnnnnnnnnnnnnnnnnnnnnnnnnnnnnnnnnnnnnnnnnnnnnnnnnnnnnnnnnnnnnnnnnnnnnnnnnnnnnnnnnnnnnnnnnnnnnnnnnnnnnnnnnnnnnnnnnnnnnnnnnnnnnnnnnnnnnnnnnnnnnnnnnnnnnnnnnnnnnnnnnnnnnnnnnnnnnnnnnnnnnnnnnnnnnnnnnnnnnnnnnnnnnnnnnnnnnnnnnnnnnnnnnnnnnnnnnnnnnnnnnnnnnnnnnnnnnnnnnnnnnnnnnnnnnnnnnnnnnnnnnnnnnnnnnnnnnnnnnnnnnnnnnnnnnnnnnnnnnnnnnnnnnnnnnnnnnnnnnnnnnnnnnnnnnnnnnnnnnnnnnnnnnnnnnnnnnnnnnnnnnnnnnnnnnnnnnnnnnnnnnnnnnnnnnnnnnnnnnnnnnnnnnnnnnnnnnnnnnnnnnnnnnnnnnnnnnnnnnnnnnnnnnnnnnnnnnnnnnnnnnnnnnnnnnnnnnnnnnnnnnnnnnnnnnnnnnnnnnnnnnnnnnnnnnnnnnnnnnnnnnnnnnnnnnnnnnnnnnnnnnnnnnnnnnnnnnnnnnnnnnnnnnnnnnnnnnnnnnnnnnnnnnnnnnnnnnnnnnnnnnnnnnnnnnnnnnnnnnnnnnnnnnnnnnnnnnnnnnnnnnnnnnnnnnnnnnnnnnnnnnnnnnnnnnnnnnnnnnnnnnnnnnnnnnnnnnnnnnnnnnnnnnnnnnnnnnnnnnnnnnnnnnnnnnnnnnnnnnnnnnnnnnnnnnnnnnnnnnnnnnnnnnnnnnnnnnnnnnnnnnnnnnnnnnnnnnnnnnnnnnnnnnnnnnnnnnnnnnnnnnnnnnnnnnnnnnnnnnnnnnnnnnnnnnnnnnnnnnnnnnnnnnnnnnnnnnnnnnnnnnnnnnnnnnnnnnnnnnnnnnnnnnnnnnnnnnnnnnnnnnnnnnnnnnnnnnnnnnnnnnnnnnnnnnnnnnnnnnnnnnnnnnnnnnnnnnnnnnnnnnnnnnnnnnnnnnnnnnnnnnnnnnnnnnnnnnnnnnnnnnnnnnnnnnnnnnnnnnnnnnnnnnnnnnnnnnnnnnnnnnnnnnnnnnnnnnnnnnnnnnnnnnnnnnnnnnnnnnnnnnnnnnnnnnnnnnnnnnnnnnnnnnnnnnnnnnnnnnnnnnnnnnnnnnnnnnnnnnnnnnnnnnnnnnnnnnnnnnnnnnnnnnnnnnnnnnnnnnnnnnnnnnnnnnnnnnnnnnnnnnnnnnnnnnnnnnnnnnnnnnnnnnnnnnnnnnnnnnnnnnnnnnnnnnnnnnnnnnnnnnnnnnnnnnnnnnnnnnnnnnnnnnnnnnnnnnnnnnnnnnnnnnnnnnnnnnnnnnnnnnnnnnnnnnnnnnnnnnnnnnnnnnnnnnnnnnnnnnnnnnnnnnnnnnnnnnnnnnnnnnnnnnnnnnnnnnnnnnnnnnnnnnnnnnnnnnnnnnnnnnnnnnnnnnnnnnnnnnnnnnnnnnnnnnnnnnnnnnnnnnnnnnnnnnnnnnnnnnnnnnnnnnnnnnnnnnnnnnnnnnnnnnnnnnnnnnnnnnnnnnnnnnnnnnnnnnnnnnnnnnnnnnnnnnnnnnnnnnnnnnnnnnnnnnnnnnnnnnnnnnnnnnnnnnnnnnnnnnnnnnnnnnnnnnnnnnnnnnnnnnnnnnnnnnnnnnnnnnnnnnnnnnnnnnnnnnnnnnnnnnnnnnnnnnnnnnnnnnnnnnnnnnnnnnnnnnnnnnnnnnnnnnnnnnnnnnnnnnnnnnnnnnnnnnnnnnnnnnnnnnnnnnnnnnnnnnnnnnnnnnnnnnnnnnnnnnnnnnnnnnnnnnnnnnnnnnnnnnnnnnnnnnnnnnnnnnnnnnnnnnnnnnnnnnnnnnnnnnnnnnnnnnnnnnnnnnnnnnnnnnnnnnnnnnnnnnnnnnnnnnnnnnnnnnnnnnnnnnnnnnnnnnnnnnnnnnnnnnnnnnnnnnnnnnnnnnnnnnnnnnnnnnnnnnnnnnnnnnnnnnnnnnnnnnnnnnnnnnnnnnnnnnnnnnnnnnnnnnnnnnnnnnnnnnnnnnnnnnnnnnnnnnnnnnnnnnnnnnnnnnnnnnnnnnnnnnnnnnnnnnnnnnnnnnnnnnnnnnnnnnnnnnnnnnnnnnnnnnnnnnnnnnnnnnnnnnnnnnnnnnnnnnnnnnnnnnnnnnnnnnnnnnnnnnnnnnnnnnnnnnnnnnnnnnnnnnnnnnnnnnnnnnnnnnnnnnnnnnnnnnnnnnnnnnnnnnnnnnnnnnnnnnnnnnnnnnnnnnnnnnnnnnnnnnnnnnnnnnnnnnnnnnnnnnnnnnnnnnnnnnnnnnnnnnnnnnnnnnnnnnnnnnnnnnnnnnnnnnnnnnnnnnnnnnnnnnnnnnnnnnnnnnnnnnnnnnnnnnnnnnnnnnnnnnnnnnnnnnnnnnnnnnnnnnnnnnnnnnnnnnnnnnnnnnnnnnnnnnnnnnnnnnnnnnnnnnnnnnnnnnnnnnnnnnnnnnnnnnnnnnnnnnnnnnnnnnnnnnnnnnnnnnnnnnnnnnnnnnnnnnnnnnnnnnnnnnnnnnnnnnnnnnnnnnnnnnnnnnnnnnnnnnnnnnnnnnnnnnnnnnnnnnnnnnnnnnnnnnnnnnnnnnnnnnnnnnnnnnnnnnnnnnnnnnnnnnnnnnnnnnnnnnnnnnnnnnnnnnnnnnnnnnnnnnnnnnnnnnnnnnnnnnnnnnnnnnnnnnnnnnnnnnnnnnnnnnnnnnnnnnnnnnnnnnnnnnnnnnnnnnnnnnnnnnnnnnnnnnnnnnnnnnnnnnnnnnnnnnnnnnnnnnnnnnnnnnnnnnnnnnnnnnnnnnnnnnnnnnnnnnnnnnnnnnnnnnnnnnnnnnnnnnnnnnnnnnnnnnnnnnnnnnnnnnnnnnnnnnnnnnnnnnnnnnnnnnnnnnnnnnnnnnnnnnnnnnnnnnnnnnnnnnnnnnnnnnnnnnnnnnnnnnnnnnnnnnnnnnnnnnnnnnnnnnnnnnnnnnnnnnnnnnnnnnnnnnnnnnnnnnnnnnnnnnnnnnnnnnnnnnnnnnnnnnnnnnnnnnnnnnnnnnnnnnnnnnnnnnnnnnnnnnnnnnnnnnnnnnnnnnnnnnnnnnnnnnnnnnnnnnnnnnnnnnnnnnnnnnnnnnnnnnnnnnnnnnnnnnnnnnnnnnnnnnnnnnnnnnnnnnnnnnnnnnnnnnnnnnnnnnnnnnnnnnnnnnnnnnnnnnnnnnnnnnnnnnnnnnnnnnnnnnnnnnnnnnnnnnnnnnnnnnnnnnnnnnnnnnnnnnnnnnnnnnnnnnnnnnnnnnnnnnnnnnnnnnnnnnnnnnnnnnnnnnnnnnnnnnnnnnnnnnnnnnnnnnnnnnnnnnnnnnnnnnnnnnnnnnnnnnnnnnnnnnnnnnnnnnnnnnnnnnnnnnnnnnnnnnnnnnnnnnnnnnnnnnnnnnnnnnnnnnnnnnnnnnnnnnnnnnnnnnnnnnnnnnnnnnnnnnnnnnnnnnnnnnnnnnnnnnnnnnnnnnnnnnnnnnnnnnnnnnnnnnnnnnnnnnnnnnnnnnnnnnnnnnnnnnnnnnnnnnnnnnnnnnnnnnnnnnnnnnnnnnnnnnnnnnnnnnnnnnnnnnnnnnnnnnnnnnnnnnnnnnnnnnnnnnnnnnnnnnnnnnnnnnnnnnnnnnnnnnnnnnnnnnnnnnnnnnnnnnnnnnnnnnnnnnnnnnnnnnnnnnnnnnnnnnnnnnnnnnnnnnnnnnnnnnnnnnnnnnnnnnnnnnnnnnnnnnnnnnnnnnnnnnnnnnnnnnnnnnnnnnnnnnnnnnnnnnnnnnnnnnnnnnnnnnnnnnnnnnnnnnnnnnnnnnnnnnnnnnnnnnnnnnnnnnnnnnnnnnnnnnnnnnnnnnnnnnnnnnnnnnnnnnnnnnnnnnnnnnnnnnnnnnnnnnnnnnnnnnnnnnnnnnnnnnnnnnnnnnnnnnnnnnnnnnnnnnnnnnnnnnnnnnnnnnnnnnnnnnnnnnnnnnnnnnnnnnnnnnnnnnnnnnnnnnnnnnnnnnnnnnnnnnnnnnnnnnnnnnnnnnnnnnnnnnnnnnnnnnnnnnnnnnnnnnnnnnnnnnnnnnnnnnnnnnnnnnnnnnnnnnnnnnnnnnnnnnnnnnnnnnnnnnnnnnnnnnnnnnnnnnnnnnnnnnnnnnnnnnnnnnnnnnnnnnnnnnnnnnnnnnnnnnnnnnnnnnnnnnnnnnnnnnnnnnnnnnnnnnnnnnnnnnnnnnnnnnnnnnnnnnnnnnnnnnnnnnnnnnnnnnnnnnnnnnnnnnnnnnnnnnnnnnnnnnnnnnnnnnnnnnnnnnnnnnnnnnnnnnnnnnnnnnnnnnnnnnnnnnnnnnnnnnnnnnnnnnnnnnnnnnnnnnnnnnnnnnnnnnnnnnnnnnnnnnnnnnnnnnnnnnnnnnnnnnnnnnnnnnnnnnnnnnnnnnnnnnnnnnnnnnnnnnnnnnnnnnnnnnnnnnnnnnnnnnnnnnnnnnnnnnnnnnnnnnnnnnnnnnnnnnnnnnnnnnnnnnnnnnnnnnnnnnnnnnnnnnnnnnnnnnnnnnnnnnnnnnnnnnnnnnnnnnnnnnnnnnnnnnnnnnnnnnnnnnnnnnnnnnnnnnnnnnnnnnnnnnnnnnnnnnnnnnnnnnnnnnnnnnnnnnnnnnnnnnnnnnnnnnnnnnnnnnnnnnnnnnnnnnnnnnnnnnnnnnnnnnnnnnnnnnnnnnnnnnnnnnnnnnnnnnnnnnnnnnnnnnnnnnnnnnnnnnnnnnnnnnnnnnnnnnnnnnnnnnnnnnnnnnnnnnnnnnnnnnnnnnnnnnnnnnnnnnnnnnnnnnnnnnnnnnnnnnnnnnnnnnnnnnnnnnnnnnnnnnnnnnnnnnnnnnnnnnnnnnnnnnnnnnnnnnnnnnnnnnnnnnnnnnnnnnnnnnnnnnnnnnnnnnnnnnnnnnnnnnnnnnnnnnnnnnnnnnnnnnnnnnnnnnnnnnnnnnnnnnnnnnnnnnnnnnnnnnnnnnnnnnnnnnnnnnnnnnnnnnnnnnnnnnnnnnnnnnnnnnnnnnnnnnnnnnnnnnnnnnnnnnnnnnnnnnnnnnnnnnnnnnnnnnnnnnnnnnnnnnnnnnnnnnnnnnnnnnnnnnnnnnnnnnnnnnnnnnnnnnnnnnnnnnnnnnnnnnnnnnnnnnnnnnnnnnnnnnnnnnnnnnnnnnnnnnnnnnnnnnnnnnnnnnnnnnnnnnnnnnnnnnnnnnnnnnnnnnnnnnnnnnnnnnnnnnnnnnnnnnnnnnnnnnnnnnnnnnnnnnnnnnnnnnnnnnnnnnnnnnnnnnnnnnnnnnnnnnnnnnnnnnnnnnnnnnnnnnnnnnnnnnnnnnnnnnnnnnnnnnnnnnnnnnnnnnnnnnnnnnnnnnnnnnnnnnnnnnnnnnnnnnnnnnnnnnnnnnnnnnnnnnnnnnnnnnnnnnnnnnnnnnnnnnnnnnnnnnnnnnnnnnnnnnnnnnnnnnnnnnnnnnnnnnnnnnnnnnnnnnnnnnnnnnnnnnnnnnnnnnnnnnnnnnnnnnnnnnnnnnnnnnnnnnnnnnnnnnnnnnnnnnnnnnnnnnnnnnnnnnnnnnnnnnnnnnnnnnnnnnnnnnnnnnnnnnnnnnnnnnnnnnnnnnnnnnnnnnnnnnnnnnnnnnnnnnnnnnnnnnnnnnnnnnnnnnnnnnnnnnnnnnnnnnnnnnnnnnnnnnnnnnnnnnnnnnnnnnnnnnnnnnnnnnnnnnnnnnnnnnnnnnnnnnnnnnnnnnnnnnnnnnnnnnnnnnnnnnnnnnnnnnnnnnnnnnnnnnnnnnnnnnnnnnnnnnnnnnnnnnnnnnnnnnnnnnnnnnnnnnnnnnnnnnnnnnnnnnnnnnnnnnnnnnnnnnnnnnnnnnnnnnnnnnnnnnnnnnnnnnnnnnnnnnnnnnnnnnnnnnnnnnnnnnnnnnnnnnnnnnnnnnnnnnnnnnnnnnnnnnnnnnnnnnnnnnnnnnnnnnnnnnnnnnnnnnnnnnnnnnnnnnnnnnnnnnnnnnnnnnnnnnnnnnnnnnnnnnnnnnnnnnnnnnnnnnnnnnnnnnnnnnnnnnnnnnnnnnnnnnnnnnnnnnnnnnnnnnnnnnnnnnnnnnnnnnnnnnnnnnnnnnnnnnnnnnnnnnnnnnnnnnnnnnnnnnnnnnnnnnnnnnnnnnnnnnnnnnnnnnnnnnnnnnnnnnnnnnnnnnnnnnnnnnnnnnnnnnnnnnnnnnnnnnnnnnnnnnnnnnnnnnnnnnnnnnnnnnnnnnnnnnnnnnnnnnnnnnnnnnnnnnnnnnnnnnnnnnnnnnnnnnnnnnnnnnnnnnnnnnnnnnnnnnnnnnnnnnnnnnnnnnnnnnnnnnnnnnnnnnnnnnnnnnnnnnnnnnnnnnnnnnnnnnnnnnnnnnnnnnnnnnnnnnnnnnnnnnnnnnnnnnnnnnnnnnnnnnnnnnnnnnnnnnnnnnnnnnnnnnnnnnnnnnnnnnnnnnnnnnnnnnnnnnnnnnnnnnnnnnnnnnnnnnnnnnnnnnnnnnnnnnnnnnnnnnnnnnnnnnnnnnnnnnnnnnnnnnnnnnnnnnnnnnnnnnnnnnnnnnnnnnnnnnnnnnnnnnnnnnnnnnnnnnnnnnnnnnnnnnnnnnnnnnnnnnnnnnnnnnnnnnnnnnnnnnnnnnnnnnnnnnnnnnnnnnnnnnnnnnnnnnnnnnnnnnnnnnnnnnnnnnnnnnnnnnnnnnnnnnnnnnnnnnnnnnnnnnnnnnnnnnnnnnnnnnnnnnnnnnnnnnnnnnnnnnnnnnnnnnnnnnnnnnnnnnnnnnnnnnnnnnnnnnnnnnnnnnnnnnnnnnnnnnnnnnnnnnnnnnnnnnnnnnnnnnnnnnnnnnnnnnnnnnnnnnnnnnnnnnnnnnnnnnnnnnnnnnnnnnnnnnnnnnnnnnnnnnnnnnnnnnnnnnnnnnnnnnnnnnnnnnnnnnnnnnnnnnnnnnnnnnnnnnnnnnnnnnnnnnnnnnnnnnnnnnnnnnnnnnnnnnnnnnnnnnnnnnnnnnnnnnnnnnnnnnnnnnnnnnnnnnnnnnnnnnnnnnnnnnnnnnnnnnnnnnnnnnnnnnnnnnnnnnnnnnnnnnnnnnnnnnnnnnnnnnnnnnnnnnnnnnnnnnnnnnnnnnnnnnnnnnnnnnnnnnnnnnnnnnnnnnnnnnnnnnnnnnnnnnnnnnnnnnnnnnnnnnnnnnnnnnnnnnnnnnnnnnnnnnnnnnnnnnnnnnnnnnnnnnnnnnnnnnnnnnnnnnnnnnnnnnnnnnnnnnnnnnnnnnnnnnnnnnnnnnnnnnnnnnnnnnnnnnnnnnnnnnnnnnnnnnnnnnnnnnnnnnnnnnnnnnnnnnnnnnnnnnnnnnnnnnnnnnnnnnnnnnnnnnnnnnnnnnnnnnnnnnnnnnnnnnnnnnnnnnnnnnnnnnnnnnnnnnnnnnnnnnnnnnnnnnnnnnnnnnnnnnnnnnnnnnnnnnnnnnnnnnnnnnnnnnnnnnnnnnnnnnnnnnnnnnnnnnnnnnnnnnnnnnnnnnnnnnnnnnnnnnnnnnnnnnnnnnnnnnnnnnnnnnnnnnnnnnnnnnnnnnnnnnnnnnnnnnnnnnnnnnnnnnnnnnnnnnnnnnnnnnnnnnnnnnnnnnnnnnnnnnnnnnnnnnnnnnnnnnnnnnnnnnnnnnnnnnnnnnnnnnnnnnnnnnnnnnnnnnnnnnnnnnnnnnnnnnnnnnnnnnnnnnnnnnnnnnnnnnnnnnnnnnnnnnnnnnnnnnnnnnnnnnnnnnnnnnnnnnnnnnnnnnnnnnnnnnnnnnnnnnnnnnnnnnnnnnnnnnnnnnnnnnnnnnnnnnnnnnnnnnnnnnnnnnnnnnnnnnnnnnnnnnnnnnnnnnnnnnnnnnnnnnnnnnnnnnnnnnnnnnnnnnnnnnnnnnnnnnnnnnnnnnnnnnnnnnnnnnnnnnnnnnnnnnnnnnnnnnnnnnnnnnnnnnnnnnnnnnnnnnnnnnnnnnnnnnnnnnnnnnnnnnnnnnnnnnnnnnnnnnnnnnnnnnnnnnnnnnnnnnnnnnnnnnnnnnnnnnnnnnnnnnnnnnnnnnnnnnnnnnnnnnnnnnnnnnnnnnnnnnnnnnnnnnnnnnnnnnnnnnnnnnnnnnnnnnnnnnnnnnnnnnnnnnnnnnnnnnnnnnnnnnnnnnnnnnnnnnnnnnnnnnnnnnnnnnnnnnnnnnnnnnnnnnnnnnnnnnnnnnnnnnnnnnnnnnnnnnnnnnnnnnnnnnnnnnnnnnnnnnnnnnnnnnnnnnnnnnnnnnnnnnnnnnnnnnnnnnnnnnnnnnnnnnnnnnnnnnnnnnnnnnnnnnnnnnnnnnnnnnnnnnnnnnnnnnnnnnnnnnnnnnnnnnnnnnnnnnnnnnnnnnnnnnnnnnnnnnnnnnnnnnnnnnnnnnnnnnnnnnnnnnnnnnnnnnnnnnnnnnnnnnnnnnnnnnnnnnnnnnnnnnnnnnnnnnnnnnnnnnnnnnnnnnnnnnnnnnnnnnnnnnnnnnnnnnnnnnnnnnnnnnnnnnnnnnnnnnnnnnnnnnnnnnnnnnnnnnnnnnnnnnnnnnnnnnnnnnnnnnnnnnnnnnnnnnnnnnnnnnnnnnnnnnnnnnnnnnnnnnnnnnnnnnnnnnnnnnnnnnnnnnnnnnnnnnnnnnnnnnnnnnnnnnnnnnnnnnnnnnnnnnnnnnnnnnnnnnnnnnnnnnnnnnnnnnnnnnnnnnnnnnnnnnnnnnnnnnnnnnnnnnnnnnnnnnnnnnnnnnnnnnnnnnnnnnnnnnnnnnnnnnnnnnnnnnnnnnnnnnnnnnnnnnnnnnnnnnnnnnnnnnnnnnnnnnnnnnnnnnnnnnnnnnnnnnnnnnnnnnnnnnnnnnnnnnnnnnnnnnnnnnnnnnnnnnnnnnnnnnnnnnnnnnnnnnnnnnnnnnnnnnnnnnnnnnnnnnnnnnnnnnnnnnnnnnnnnnnnnnnnnnnnnnnnnnnnnnnnnnnnnnnnnnnnnnnnnnnnnnnnnnnnnnnnnnnnnnnnnnnnnnnnnnnnnnnnnnnnnnnnnnnnnnnnnnnnnnnnnnnnnnnnnnnnnnnnnnnnnnnnnnnnnnnnnnnnnnnnnnnnnnnnnnnnnnnnnnnnnnnnnnnnnnnnnnnnnnnnnnnnnnnnnnnnnnnnnnnnnnnnnnnnnnnnnnnnnnnnnnnnnnnnnnnnnnnnnnnnnnnnnnnnnnnnnnnnnnnnnnnnnnnnnnnnnnnnnnnnnnnnnnnnnnnnnnnnnnnnnnnnnnnnnnnnnnnnnnnnnnnnnnnnnnnnnnnnnnnnnnnnnnnnnnnnnnnnnnnnnnnnnnnnnnnnnnnnnnnnnnnnnnnnnnnnnnnnnnnnnnnnnnnnnnnnnnnnnnnnnnnnnnnnnnnnnnnnnnnnnnnnnnnnnnnnnnnnnnnnnnnnnnnnnnnnnnnnnnnnnnnnnnnnnnnnnnnnnnnnnnnnnnnnnnnnnnnnnnnnnnnnnnnnnnnnnnnnnnnnnnnnnnnnnnnnnnnnnnnnnnnnnnnnnnnnnnnnnnnnnnnnnnnnnnnnnnnnnnnnnnnnnnnnnnnnnnnnnnnnnnnnnnnnnnnnnnnnnnnnnnnnnnnnnnnnnnnnnnnnnnnnnnnnnnnnnnnnnnnnnnnnnnnnnnnnnnnnnnnnnnnnnnnnnnnnnnnnnnnnnnnnnnnnnnnnnnnnnnnnnnnnnnnnnnnnnnnnnnnnnnnnnnnnnnnnnnnnnnnnnnnnnnnnnnnnnnnnnnnnnnnnnnnnnnnnnnnnnnnnnnnnnnnnnnnnnnnnnnnnnnnnnnnnnnnnnnnnnnnnnnnnnnnnnnnnnnnnnnnnnnnnnnnnnnnnnnnnnnnnnnnnnnnnnnnnnnnnnnnnnnnnnnnnnnnnnnnnnnnnnnnnnnnnnnnnnnnnnnnnnnnnnnnnnnnnnnnnnnnnnnnnnnnnnnnnnnnnnnnnnnnnnnnnnnnnnnnnnnnnnnnnnnnnnnnnnnnnnnnnnnnnnnnnnnnnnnnnnnnnnnnnnnnnnnnnnnnnnnnnnnnnnnnnnnnnnnnnnnnnnnnnnnnnnnnnnnnnnnnnnnnnnnnnnnnnnnnnnnnnnnnnnnnnnnnnnnnnnnnnnnnnnnnnnnnnnnnnnnnnnnnnnnnnnnnnnnnnnnnnnnnnnnnnnnnnnnnnnnnnnnnnnnnnnnnnnnnnnnnnnnnnnnnnnnnnnnnnnnnnnnnnnnnnnnnnnnnnnnnnnnnnnnnnnnnnnnnnnnnnnnnnnnnnnnnnnnnnnnnnnnnnnnnnnnnnnnnnnnnnnnnnnnnnnnnnnnnnnnnnnnnnnnnnnnnnnnnnnnnnnnnnnnnnnnnnnnnnnnnnnnnnnnnnnnnnnnnnnnnnnnnnnnnnnnnnnnnnnnnnnnnnnnnnnnnnnnnnnnnnnnnnnnnnnnnnnnnnnnnnnnnnnnnnnnnnnnnnnnnnnnnnnnnnnnnnnnnnnnnnnnnnnnnnnnnnnnnnnnnnnnnnnnnnnnnnnnnnnnnnnnnnnnnnnnnnnnnnnnnnnnnnnnnnnnnnnnnnnnnnnnnnnnnnnnnnnnnnnnnnnnnnnnnnnnnnnnnnnnnnnnnnnnnnnnnnnnnnnnnnnnnnnnnnnnnnnnnnnnnnnnnnnnnnnnnnnnnnnnnnnnnnnnnnnnnnnnnnnnnnnnnnnnnnnnnnnnnnnnnnnnnnnnnnnnnnnnnnnnnnnnnnnnnnnnnnnnnnnnnnnnnnnnnnnnnnnnnnnnnnnnnnnnnnnnnnnnnnnnnnnnnnnnnnnnnnnnnnnnnnnnnnnnnnnnnnnnnnnnnnnnnnnnnnnnnnnnnnnnnnnnnnnnnnnnnnnnnnnnnnnnnnnnnnnnnnnnnnnnnnnnnnnnnnnnnnnnnnnnnnnnnnnnnnnnnnnnnnnnnnnnnnnnnnnnnnnnnnnnnnnnnnnnnnnnnnnnnnnnnnnnnnnnnnnnnnnnnnnnnnnnnnnnnnnnnnnnnnnnnnnnnnnnnnnnnnnnnnnnnnnnnnnnnnnnnnnnnnnnnnnnnnnnnnnnnnnnnnnnnnnnnnnnnnnnnnnnnnnnnnnnnnnnnnnnnnnnnnnnnnnnnnnnnnnnnnnnnnnnnnnnnnnnnnnnnnnnnnnnnnnnnnnnnnnnnnnnnnnnnnnnnnnnnnnnnnnnnnnnnnnnnnnnnnnnnnnnnnnnnnnnnnnnnnnnnnnnnnnnnnnnnnnnnnnnnnnnnnnnnnnnnnnnnnnnnnnnnnnnnnnnnnnnnnnnnnnnnnnnnnnnnnnnnnnnnnnnnnnnnnnnnnnnnnnnnnnnnnnnnnnnnnnnnnnnnnnnnnnnnnnnnnnnnnnnnnnnnnnnnnnnnnnnnnnnnnnnnnnnnnnnnnnnnnnnnnnnnnnnnnnnnnnnnnnnnnnnnnnnnnnnnnnnnnnnnnnnnnnnnnnnnnnnnnnnnnnnnnnnnnnnnnnnnnnnnnnnnnnnnnnnnnnnnnnnnnnnnnnnnnnnnnnnnnnnnnnnnnnnnnnnnnnnnnnnnnnnnnnnnnnnnnnnnnnnnnnnnnnnnnnnnnnnnnnnnnnnnnnnnnnnnnnnnnnnnnnnnnnnnnnnnnnnnnnnnnnnnnnnnnnnnnnnnnnnnnnnnnnnnnnnnnnnnnnnnnnnnnnnnnnnnnnnnnnnnnnnnnnnnnnnnnnnnnnnnnnnnnnnnnnnnnnnnnnnnnnnnnnnnnnnnnnnnnnnnnnnnnnnnnnnnnnnnnnnnnnnnnnnnnnnnnnnnnnnnnnnnnnnnnnnnnnnnnnnnnnnnnnnnnnnnnnnnnnnnnnnnnnnnnnnnnnnnnnnnnnnnnnnnnnnnnnnnnnnnnnnnnnnnnnnnnnnnnnnnnnnnnnnnnnnnnnnnnnnnnnnnnnnnnnnnnnnnnnnnnnnnnnnnnnnnnnnnnnnnnnnnnnnnnnnnnnnnnnnnnnnnnnnnnnnnnnnnnnnnnnnnnnnnnnnnnnnnnnnnnnnnnnnnnnnnnnnnnnnnnnnnnnnnnnnnnnnnnnnnnnnnnnnnnnnnnnnnnnnnnnnnnnnnnnnnnnnnnnnnnnnnnnnnnnnnnnnnnnnnnnnnnnnnnnnnnnnnnnnnnnnnnnnnnnnnnnnnnnnnnnnnnnnnnnnnnnnnnnnnnnnnnnnnnnnnnnnnnnnnnnnnnnnnnnnnnnnnnnnnnnnnnnnnnnnnnnnnnnnnnnnnnnnnnnnnnnnnnnnnnnnnnnnnnnnnnnnnnnnnnnnnnnnnnnnnnnnnnnnnnnnnnnnnnnnnnnnnnnnnnnnnnnnnnnnnnnnnnnnnnnnnnnnnnnnnnnnnnnnnnnnnnnnnnnnnnnnnnnnnnnnnnnnnnnnnnnnnnnnnnnnnnnnnnnnnnnnnnnnnnnnnnnnnnnnnnnnnnnnnnnnnnnnnnnnnnnnnnnnnnnnnnnnnnnnnnnnnnnnnnnnnnnnnnnnnnnnnnnnnnnnnnnnnnnnnnnnnnnnnnnnnnnnnnnnnnnnnnnnnnnnnnnnnnnnnnnnnnnnnnnnnnnnnnnnnnnnnnnnnnnnnnnnnnnnnnnnnnnnnnnnnnnnnnnnnnnnnnnnnnnnnnnnnnnnnnnnnnnnnnnnnnnnnnnnnnnnnnnnnnnnnnnnnnnnnnnnnnnnnnnnnnnnnnnnnnnnnnnnnnnnnnnnnnnnnnnnnnnnnnnnnnnnnnnnnnnnnnnnnnnnnnnnnnnnnnnnnnnnnnnnnnnnnnnnnnnnnnnnnnnnnnnnnnnnnnnnnnnnnnnnnnnnnnnnnnnnnnnnnnnnnnnnnnnnnnnnnnnnnnnnnnnnnnnnnnnnnnnnnnnnnnnnnnnnnnnnnnnnnnnnnnnnnnnnnnnnnnnnnnnnnnnnnnnnnnnnnnnnnnnnnnnnnnnnnnnnnnnnnnnnnnnnnnnnnnnnnnnnnnnnnnnnnnnnnnnnnnnnnnnnnnnnnnnnnnnnnnnnnnnnnnnnnnnnnnnnnnnnnnnnnnnnnnnnnnnnnnnnnnnnnnnnnnnnnnnnnnnnnnnnnnnnnnnnnnnnnnnnnnnnnnnnnnnnnnnnnnnnnnnnnnnnnnnnnnnnnnnnnnnnnnnnnnnnnnnnnnnnnnnnnnnnnnnnnnnnnnnnnnnnnnnnnnnnnnnnnnnnnnnnnnnnnnnnnnnnnnnnnnnnnnnnnnnnnnnnnnnnnnnnnnnnnnnnnnnnnnnnnnnnnnnnnnnnnnnnnnnnnnnnnnnnnnnnnnnnnnnnnnnnnnnnnnnnnnnnnnnnnnnnnnnnnnnnnnnnnnnnnnnnnnnnnnnnnnnnnnnnnnnnnnnnnnnnnnnnnnnnnnnnnnnnnnnnnnnnnnnnnnnnnnnnnnnnnnnnnnnnnnnnnnnnnnnnnnnnnnnnnnnnnnnnnnnnnnnnnnnnnnnnnnnnnnnnnnnnnnnnnnnnnnnnnnnnnnnnnnnnnnnnnnnnnnnnnnnnnnnnnnnnnnnnnnnnnnnnnnnnnnnnnnnnnnnnnnnnnnnnnnnnnnnnnnnnnnnnnnnnnnnnnnnnnnnnnnnnnnnnnnnnnnnnnnnnnnnnnnnnnnnnnnnnnnnnnnnnnnnnnnnnnnnnnnnnnnnnnnnnnnnnnnnnnnnnnnnnnnnnnnnnnnnnnnnnnnnnnnnnnnnnnnnnnnnnnnnnnnnnnnnnnnnnnnnnnnnnnnnnnnnnnnnnnnnnnnnnnnnnnnnnnnnnnnnnnnnnnnnnnnnnnnnnnnnnnnnnnnnnnnnnnnnnnnnnnnnnnnnnnnnnnnnnnnnnnnnnnnnnnnnnnnnnnnnnnnnnnnnnnnnnnnnnnnnnnnnnnnnnnnnnnnnnnnnnnnnnnnnnnnnnnnnnnnnnnnnnnnnnnnnnnnnnnnnnnnnnnnnnnnnnnnnnnnnnnnnnnnnnnnnnnnnnnnnnnnnnnnnnnnnnnnnnnnnnnnnnnnnnnnnnnnnnnnnnnnnnnnnnnnnnnnnnnnnnnnnnnnnnnnnnnnnnnnnnnnnnnnnnnnnnnnnnnnnnnnnnnnnnnnnnnnnnnnnnnnnnnnnnnnnnnnnnnnnnnnnnnnnnnnnnnnnnnnnnnnnnnnnnnnnnnnnnnnnnnnnnnnnnnnnnnnnnnnnnnnnnnnnnnnnnnnnnnnnnnnnnnnnnnnnnnnnnnnnnnnnnnnnnnnnnnnnnnnnnnnnnnnnnnnnnnnnnnnnnnnnnnnnnnnnnnnnnnnnnnnnnnnnnnnnnnnnnnnnnnnnnnnnnnnnnnnnnnnnnnnnnnnnnnnnnnnnnnnnnnnnnnnnnnnnnnnnnnnnnnnnnnnnnnnnnnnnnnnnnnnnnnnnnnnnnnnnnnnnnnnnnnnnnnnnnnnnnnnnnnnnnnnnnnnnnnnnnnnnnnnnnnnnnnnnnnnnnnnnnnnnnnnnnnnnnnnnnnnnnnnnnnnnnnnnnnnnnnnnnnnnnnnnnnnnnnnnnnnnnnnnnnnnnnnnnnnnnnnnnnnnnnnnnnnnnnnnnnnnnnnnnnnnnnnnnnnnnnnnnnnnnnnnnnnnnnnnnnnnnnnnnnnnnnnnnnnnnnnnnnnnnnnnnnnnnnnnnnnnnnnnnnnnnnnnnnnnnnnnnnnnnnnnnnnnnnnnnnnnnnnnnnnnnnnnnnnnnnnnnnnnnnnnnnnnnnnnnnnnnnnnnnnnnnnnnnnnnnnnnnnnnnnnnnnnnnnnnnnnnnnnnnnnnnnnnnnnnnnnnnnnnnnnnnnnnnnnnnnnnnnnnnnnnnnnnnnnnnnnnnnnnnnnnnnnnnnnnnnnnnnnnnnnnnnnnnnnnnnnnnnnnnnnnnnnnnnnnnnnnnnnnnnnnnnnnnnnnnnnnnnnnnnnnnnnnnnnnnnnnnnnnnnnnnnnnnnnnnnnnnnnnnnnnnnnnnnnnnnnnnnnnnnnnnnnnnnnnnnnnnnnnnnnnnnnnnnnnnnnnnnnnnnnnnnnnnnnnnnnnnnnnnnnnnnnnnnnnnnnnnnnnnnnnnnnnnnnnnnnnnnnnnnnnnnnnnnnnnnnnnnnnnnnnnnnnnnnnnnnnnnnnnnnnnnnnnnnnnnnnnnnnnnnnnnnnnnnnnnnnnnnnnnnnnnnnnnnnnnnnnnnnnnnnnnnnnnnnnnnnnnnnnnnnnnnnnnnnnnnnnnnnnnnnnnnnnnnnnnnnnnnnnnnnnnnnnnnnnnnnnnnnnnnnnnnnnnnnnnnnnnnnnnnnnnnnnnnnnnnnnnnnnnnnnnnnnnnnnnnnnnnnnnnnnnnnnnnnnnnnnnnnnnnnnnnnnnnnnnnnnnnnnnnnnnnnnnnnnnnnnnnnnnnnnnnnnnnnnnnnnnnnnnnnnnnnnnnnnnnnnnnnnnnnnnnnnnnnnnnnnnnnnnnnnnnnnnnnnnnnnnnnnnnnnnnnnnnnnnnnnnnnnnnnnnnnnnnnnnnnnnnnnnnnnnnnnnnnnnnnnnnnnnnnnnnnnnnnnnnnnnnnnnnnnnnnnnnnnnnnnnnnnnnnnnnnnnnnnnnnnnnnnnnnnnnnnnnnnnnnnnnnnnnnnnnnnnnnnnnnnnnnnnnnnnnnnnnnnnnnnnnnnnnnnnnnnnnnnnnnnnnnnnnnnnnnnnnnnnnnnnnnnnnnnnnnnnnnnnnnnnnnnnnnnnnnnnnnnnnnnnnnnnnnnnnnnnnnnnnnnnnnnnnnnnnnnnnnnnnnnnnnnnnnnnnnnnnnnnnnnnnnnnnnnnnnnnnnnnnnnnnnnnnnnnnnnnnnnnnnnnnnnnnnnnnnnnnnnnnnnnnnnnnnnnnnnnnnnnnnnnnnnnnnnnnnnnnnnnnnnnnnnnnnnnnnnnnnnnnnnnnnnnnnnnnnnnnnnnnnnnnnnnnnnnnnnnnnnnnnnnnnnnnnnnnnnnnnnnnnnnnnnnnnnnnnnnnnnnnnnnnnnnnnnnnnnnnnnnnnnnnnnnnnnnnnnnnnnnnnnnnnnnnnnnnnnnnnnnnnnnnnnnnnnnnnnnnnnnnnnnnnnnnnnnnnnnnnnnnnnnnnnnnnnnnnnnnnnnnnnnnnnnnnnnnnnnnnnnnnnnnnnnnnnnnnnnnnnnnnnnnnnnnnnnnnnnnnnnnnnnnnnnnnnnnnnnnnnnnnnnnnnnnnnnnnnnnnnnnnnnnnnnnnnnnnnnnnnnnnnnnnnnnnnnnnnnnnnnnnnnnnnnnnnnnnnnnnnnnnnnnnnnnnnnnnnnnnnnnnnnnnnnnnnnnnnnnnnnnnnnnnnnnnnnnnnnnnnnnnnnnnnnnnnnnnnnnnnnnnnnnnnnnnnnnnnnnnnnnnnnnnnnnnnnnnnnnnnnnnnnnnnnnnnnnnnnnnnnnnnnnnnnnnnnnnnnnnnnnnnnnnnnnnnnnnnnnnnnnnnnnnnnnnnnnnnnnnnnnnnnnnnnnnnnnnnnnnnnnnnnnnnnnnnnnnnnnnnnnnnnnnnnnnnnnnnnnnnnnnnnnnnnnnnnnnnnnnnnnnnnnnnnnnnnnnnnnnnnnnnnnnnnnnnnnnnnnnnnnnnnnnnnnnnnnnnnnnnnnnnnnnnnnnnnnnnnnnnnnnnnnnnnnnnnnnnnnnnnnnnnnnnnnnnnnnnnnnnnnnnnnnnnnnnnnnnnnnnnnnnnnnnnnnnnnnnnnnnnnnnnnnnnnnnnnnnnnnnnnnnnnnnnnnnnnnnnnnnnnnnnnnnnnnnnnnnnnnnnnnnnnnnnnnnnnnnnnnnnnnnnnnnnnnnnnnnnnnnnnnnnnnnnnnnnnnnnnnnnnnnnnnnnnnnnnnnnnnnnnnnnnnnnnnnnnnnnnnnnnnnnnnnnnnnnnnnnnnnnnnnnnnnnnnnnnnnnnnnnnnnnnnnnnnnnnnnnnnnnnnnnnnnnnnnnnnnnnnnnnnnnnnnnnnnnnnnnnnnnnnnnnnnnnnnnnnnnnnnnnnnnnnnnnnnnnnnnnnnnnnnnnnnnnnnnnnnnnnnnnnnnnnnnnnnnnnnnnnnnnnnnnnnnnnnnnnnnnnnnnnnnnnnnnnnnnnnnnnnnnnnnnnnnnnnnnnnnnnnnnnnnnnnnnnnnnnnnnnnnnnnnnnnnnnnnnnnnnnnnnnnnnnnnnnnnnnnnnnnnnnnnnnnnnnnnnnnnnnnnnnnnnnnnnnnnnnnnnnnnnnnnnnnnnnnnnnnnnnnnnnnnnnnnnnnnnnnnnnnnnnnnnnnnnnnnnnnnnnnnnnnnnnnnnnnnnnnnnnnnnnnnnnnnnnnnnnnnnnnnnnnnnnnnnnnnnnnnnnnnnnnnnnnnnnnnnnnnnnnnnnnnnnnnnnnnnnnnnnnnnnnnnnnnnnnnnnnnnnnnnnnnnnnnnnnnnnnnnnnnnnnnnnnnnnnnnnnnnnnnnnnnnnnnnnnnnnnnnnnnnnnnnnnnnnnnnnnnnnnnnnnnnnnnnnnnnnnnnnnnnnnnnnnnnnnnnnnnnnnnnnnnnnnnnnnnnnnnnnnnnnnnnnnnnnnnnnnnnnnnnnnnnnnnnnnnnnnnnnnnnnnnnnnnnnnnnnnnnnnnnnnnnnnnnnnnnnnnnnnnnnnnnnnnnnnnnnnnnnnnnnnnnnnnnnnnnnnnnnnnnnnnnnnnnnnnnnnnnnnnnnnnnnnnnnnnnnnnnnnnnnnnnnnnnnnnnnnnnnnnnnnnnnnnnnnnnnnnnnnnnnnnnnnnnnnnnnnnnnnnnnnnnnnnnnnnnnnnnnnnnnnnnnnnnnnnnnnnnnnnnnnnnnnnnnnnnnnnnnnnnnnnnnnnnnnnnnnnnnnnnnnnnnnnnnnnnnnnnnnnnnnnnnnnnnnnnnnnnnnnnnnnnnnnnnnnnnnnnnnnnnnnnnnnnnnnnnnnnnnnnnnnnnnnnnnnnnnnnnnnnnnnnnnnnnnnnnnnnnnnnnnnnnnnnnnnnnnnnnnnnnnnnnnnnnnnnnnnnnnnnnnnnnnnnnnnnnnnnnnnnnnnnnnnnnnnnnnnnnnnnnnnnnnnnnnnnnnnnnnnnnnnnnnnnnnnnnnnnnnnnnnnnnnnnnnnnnnnnnnnnnnnnnnnnnnnnnnnnnnnnnnnnnnnnnnnnnnnnnnnnnnnnnnnnnnnnnnnnnnnnnnnnnnnnnnnnnnnnnnnnnnnnnnnnnnnnnnnnnnnnnnnnnnnnnnnnnnnnnnnnnnnnnnnnnnnnnnnnnnnnnnnnnnnnnnnnnnnnnnnnnnnnnnnnnnnnnnnnnnnnnnnnnnnnnnnnnnnnnnnnnnnnnnnnnnnnnnnnnnnnnnnnnnnnnnnnnnnnnnnnnnnnnnnnnnnnnnnnnnnnnnnnnnnnnnnnnnnnnnnnnnnnnnnnnnnnnnnnnnnnnnnnnnnnnnnnnnnnnnnnnnnnnnnnnnnnnnnnnnnnnnnnnnnnnnnnnnnnnnnnnnnnnnnnnnnnnnnnnnnnnnnnnnnnnnnnnnnnnnnnnnnnnnnnnnnnnnnnnnnnnnnnnnnnnnnnnnnnnnnnnnnnnnnnnnnnnnnnnnnnnnnnnnnnnnnnnnnnnnnnnnnnnnnnnnnnnnnnnnnnnnnnnnnnnnnnnnnnnnnnnnnnnnnnnnnnnnnnnnnnnnnnnnnnnnnnnnnnnnnnnnnnnnnnnnnnnnnnnnnnnnnnnnnnnnnnnnnnnnnnnnnnnnnnnnnnnnnnnnnnnnnnnnnnnnnnnnnnnnnnnnnnnnnnnnnnnnnnnnnnnnnnnnnnnnnnnnnnnnnnnnnnnnnnnnnnnnnnnnnnnnnnnnnnnnnnnnnnnnnnnnnnnnnnnnnnnnnnnnnnnnnnnnnnnnnnnnnnnnnnnnnnnnnnnnnnnnnnnnnnnnnnnnnnnnnnnnnnnnnnnnnnnnnnnnnnnnnnnnnnnnnnnnnnnnnnnnnnnnnnnnnnnnnnnnnnnnnnnnnnnnnnnnnnnnnnnnnnnnnnnnnnnnnnnnnnnnnnnnnnnnnnnnnnnnnnnnnnnnnnnnnnnnnnnnnnnnnnnnnnnnnnnnnnnnnnnnnnnnnnnnnnnnnnnnnnnnnnnnnnnnnnnnnnnnnnnnnnnnnnnnnnnnnnnnnnnnnnnnnnnnnnnnnnnnnnnnnnnnnnnnnnnnnnnnnnnnnnnnnnnnnnnnnnnnnnnnnnnnnnnnnnnnnnnnnnnnnnnnnnnnnnnnnnnnnnnnnnnnnnnnnnnnnnnnnnnnnnnnnnnnnnnnnnnnnnnnnnnnnnnnnnnnnnnnnnnnnnnnnnnnnnnnnnnnnnnnnnnnnnnnnnnnnnnnnnnnnnnnnnnnnnnnnnnnnnnnnnnnnnnnnnnnnnnnnnnnnnnnnnnnnnnnnnnnnnnnnnnnnnnnnnnnnnnnnnnnnnnnnnnnnnnnnnnnnnnnnnnnnnnnnnnnnnnnnnnnnnnnnnnnnnnnnnnnnnnnnnnnnnnnnnnnnnnnnnnnnnnnnnnnnnnnnnnnnnnnnnnnnnnnnnnnnnnnnnnnnnnnnnnnnnnnnnnnnnnnnnnnnnnnnnnnnnnnnnnnnnnnnnnnnnnnnnnnnnnnnnnnnnnnnnnnnnnnnnnnnnnnnnnnnnnnnnnnnnnnnnnnnnnnnnnnnnnnnnnnnnnnnnnnnnnnnnnnnnnnnnnnnnnnnnnnnnnnnnnnnnnnnnnnnnnnnnnnnnnnnnnnnnnnnnnnnnnnnnnnnnnnnnnnnnnnnnnnnnnnnnnnnnnnnnnnnnnnnnnnnnnnnnnnnnnnnnnnnnnnnnnnnnnnnnnnnnnnnnnnnnnnnnnnnnnnnnnnnnnnnnnnnnnnnnnnnnnnnnnnnnnnnnnnnnnnnnnnnnnnnnnnnnnnnnnnnnnnnnnnnnnnnnnnnnnnnnnnnnnnnnnnnnnnnnnnnnnnnnnnnnnnnnnnnnnnnnnnnnnnnnnnnnnnnnnnnnnnnnnnnnnnnnnnnnnnnnnnnnnnnnnnnnnnnnnnnnnnnnnnnnnnnnnnnnnnnnnnnnnnnnnnnnnnnnnnnnnnnnnnnnnnnnnnnnnnnnnnnnnnnnnnnnnnnnnnnnnnnnnnnnnnnnnnnnnnnnnnnnnnnnnnnnnnnnnnnnnnnnnnnnnnnnnnnnnnnnnnnnnnnnnnnnnnnnnnnnnnnnnnnnnnnnnnnnnnnnnnnnnnnnnnnnnnnnnnnnnnnnnnnnnnnnnnnnnnnnnnnnnnnnnnnnnnnnnnnnnnnnnnnnnnnnnnnnnnnnnnnnnnnnnnnnnnnnnnnnnnnnnnnnnnnnnnnnnnnnnnnnnnnnnnnnnnnnnnnnnnnnnnnnnnnnnnnnnnnnnnnnnnnnnnnnnnnnnnnnnnnnnnnnnnnnnnnnnnnnnnnnnnnnnnnnnnnnnnnnnnnnnnnnnnnnnnnnnnnnnnnnnnnnnnnnnnnnnnnnnnnnnnnnnnnnnnnnnnnnnnnnnnnnnnnnnnnnnnnnnnnnnnnnnnnnnnnnnnnnnnnnnnnnnnnnnnnnnnnnnnnnnnnnnnnnnnnnnnnnnnnnnnnnnnnnnnnnnnnnnnnnnnnnnnnnnnnnnnnnnnnnnnnnnnnnnnnnnnnnnnnnnnnnnnnnnnnnnnnnnnnnnnnnnnnnnnnnnnnnnnnnnnnnnnnnnnnnnnnnnnnnnnnnnnnnnnnnnnnnnnnnnnnnnnnnnnnnnnnnnnnnnnnnnnnnnnnnnnnnnnnnnnnnnnnnnnnnnnnnnnnnnnnnnnnnnnnnnnnnnnnnnnnnnnnnnnnnnnnnnnnnnnnnnnnnnnnnnnnnnnnnnnnnnnnnnnnnnnnnnnnnnnnnnnnnnnnnnnnnnnnnnnnnnnnnnnnnnnnnnnnnnnnnnnnnnnnnnnnnnnnnnnnnnnnnnnnnnnnnnnnnnnnnnnnnnnnnnnnnnnnnnnnnnnnnnnnnnnnnnnnnnnnnnnnnnnnnnnnnnnnnnnnnnnnnnnnnnnnnnnnnnnnnnnnnnnnnnnnnnnnnnnnnnnnnnnnnnnnnnnnnnnnnnnnnnnnnnnnnnnnnnnnnnnnnnnnnnnnnnnnnnnnnnnnnnnnnnnnnnnnnnnnnnnnnnnnnnnnnnnnnnnnnnnnnnnnnnnnnnnnnnnnnnnnnnnnnnnnnnnnnnnnnnnnnnnnnnnnnnnnnnnnnnnnnnnnnnnnnnnnnnnnnnnnnnnnnnnnnnnnnnnnnnnnnnnnnnnnnnnnnnnnnnnnnnnnnnnnnnnnnnnnnnnnnnnnnnnnnnnnnnnnnnnnnnnnnnnnnnnnnnnnnnnnnnnnnnnnnnnnnnnnnnnnnnnnnnnnnnnnnnnnnnnnnnnnnnnnnnnnnnnnnnnnnnnnnnnnnnnnnnnnnnnnnnnnnnnnnnnnnnnnnnnnnnnnnnnnnnnnnnnnnnnnnnnnnnnnnnnnnnnnnnnnnnnnnnnnnnnnnnnnnnnnnnnnnnnnnnnnnnnnnnnnnnnnnnnnnnnnnnnnnnnnnnnnnnnnnnnnnnnnnnnnnnnnnnnnnnnnnnnnnnnnnnnnnnnnnnnnnnnnnnnnnnnnnnnnnnnnnnnnnnnnnnnnnnnnnnnnnnnnnnnnnnnnnnnnnnnnnnnnnnnnnnnnnnnnnnnnnnnnnnnnnnnnnnnnnnnnnnnnnnnnnnnnnnnnnnnnnnnnnnnnnnnnnnnnnnnnnnnnnnnnnnnnnnnnnnnnnnnnnnnnnnnnnnnnnnnnnnnnnnnnnnnnnnnnnnnnnnnnnnnnnnnnnnnnnnnnnnnnnnnnnnnnnnnnnnnnnnnnnnnnnnnnnnnnnnnnnnnnnnnnnnnnnnnnnnnnnnnnnnnnnnnnnnnnnnnnnnnnnnnnnnnnnnnnnnnnnnnnnnnnnnnnnnnnnnnnnnnnnnnnnnnnnnnnnnnnnnnnnnnnnnnnnnnnnnnnnnnnnnnnnnnnnnnnnnnnnnnnnnnnnnnnnnnnnnnnnnnnnnnnnnnnnnnnnnnnnnnnnnnnnnnnnnnnnnnnnnnnnnnnnnnnnnnnnnnnnnnnnnnnnnnnnnnnnnnnnnnnnnnnnnnnnnnnnnnnnnnnnnnnnnnnnnnnnnnnnnnnnnnnnnnnnnnnnnnnnnnnnnnnnnnnnnnnnnnnnnnnnnnnnnnnnnnnnnnnnnnnnnnnnnnnnnnnnnnnnnnnnnnnnnnnnnnnnnnnnnnnnnnnnnnnnnnnnnnnnnnnnnnnnnnnnnnnnnnnnnnnnnnnnnnnnnnnnnnnnnnnnnnnnnnnnnnnnnnnnnnnnnnnnnnnnnnnnnnnnnnnnnnnnnnnnnnnnnnnnnnnnnnnnnnnnnnnnnnnnnnnnnnnnnnnnnnnnnnnnnnnnnnnnnnnnnnnnnnnnnnnnnnnnnnnnnnnnnnnnnnnnnnnnnnnnnnnnnnnnnnnnnnnnnnnnnnnnnnnnnnnnnnnnnnnnnnnnnnnnnnnnnnnnnnnnnnnnnnnnnnnnnnnnnnnnnnnnnnnnnnnnnnnnnnnnnnnnnnnnnnnnnnnnnnnnnnnnnnnnnnnnnnnnnnnnnnnnnnnnnnnnnnnnnnnnnnnnnnnnnnnnnnnnnnnnnnnnnnnnnnnnnnnnnnnnnnnnnnnnnnnnnnnnnnnnnnnnnnnnnnnnnnnnnnnnnnnnnnnnnnnnnnnnnnnnnnnnnnnnnnnnnnnnnnnnnnnnnnnnnnnnnnnnnnnnnnnnnnnnnnnnnnnnnnnnnnnnnnnnnnnnnnnnnnnnnnnnnnnnnnnnnnnnnnnnnnnnnnnnnnnnnnnnnnnnnnnnnnnnnnnnnnnnnnnnnnnnnnnnnnnnnnnnnnnnnnnnnnnnnnnnnnnnnnnnnnnnnnnnnnnnnnnnnnnnnnnnnnnnnnnnnnnnnnnnnnnnnnnnnnnnnnnnnnnnnnnnnnnnnnnnnnnnnnnnnnnnnnnnnnnnnnnnnnnnnnnnnnnnnnnnnnnnnnnnnnnnnnnnnnnnnnnnnnnnnnnnnnnnnnnnnnnnnnnnnnnnnnnnnnnnnnnnnnnnnnnnnnnnnnnnnnnnnnnnnnnnnnnnnnnnnnnnnnnnnnnnnnnnnnnnnnnnnnnnnnnnnnnnnnnnnnnnnnnnnnnnnnnnnnnnnnnnnnnnnnnnnnnnnnnnnnnnnnnnnnnnnnnnnnnnnnnnnnnnnnnnnnnnnnnnnnnnnnnnnnnnnnnnnnnnnnnnnnnnnnnnnnnnnnnnnnnnnnnnnnnnnnnnnnnnnnnnnnnnnnnnnnnnnnnnnnnnnnnnnnnnnnnnnnnnnnnnnnnnnnnnnnnnnnnnnnnnnnnnnnnnnnnnnnnnnnnnnnnnnnnnnnnnnnnnnnnnnnnnnnnnnnnnnnnnnnnnnnnnnnnnnnnnnnnnnnnnnnnnnnnnnnnnnnnnnnnnnnnnnnnnnnnnnnnnnnnnnnnnnnnnnnnnnnnnnnnnnnnnnnnnnnnnnnnnnnnnnnnnnnnnnnnnnnnnnnnnnnnnnnnnnnnnnnnnnnnnnnnnnnnnnnnnnnnnnnnnnnnnnnnnnnnnnnnnnnnnnnnnnnnnnnnnnnnnnnnnnnnnnnnnnnnnnnnnnnnnnnnnnnnnnnnnnnnnnnnnnnnnnnnnnnnnnnnnnnnnnnnnnnnnnnnnnnnnnnnnnnnnnnnnnnnnnnnnnnnnnnnnnnnnnnnnnnnnnnnnnnnnnnnnnnnnnnnnnnnnnnnnnnnnnnnnnnnnnnnnnnnnnnnnnnnnnnnnnnnnnnnnnnnnnnnnnnnnnnnnnnnnnnnnnnnnnnnnnnnnnnnnnnnnnnnnnnnnnnnnnnnnnnnnnnnnnnnnnnnnnnnnnnnnnnnnnnnnnnnnnnnnnnnnnnnnnnnnnnnnnnnnnnnnnnnnnnnnnnnnnnnnnnnnnnnnnnnnnnnnnnnnnnnnnnnnnnnnnnnnnnnnnnnnnnnnnnnnnnnnnnnnnnnnnnnnnnnnnnnnnnnnnnnnnnnnnnnnnnnnnnnnnnnnnnnnnnnnnnnnnnnnnnnnnnnnnnnnnnnnnnnnnnnnnnnnnnnnnnnnnnnnnnnnnnnnnnnnnnnnnnnnnnnnnnnnnnnnnnnnnnnnnnnnnnnnnnnnnnnnnnnnnnnnnnnnnnnnnnnnnnnnnnnnnnnnnnnnnnnnnnnnnnnnnnnnnnnnnnnnnnnnnnnnnnnnnnnnnnnnnnnnnnnnnnnnnnnnnnnnnnnnnnnnnnnnnnnnnnnnnnnnnnnnnnnnnnnnnnnnnnnnnnnnnnnnnnnnnnnnnnnnnnnnnnnnnnnnnnnnnnnnnnnnnnnnnnnnnnnnnnnnnnnnnnnnnnnnnnnnnnnnnnnnnnnnnnnnnnnnnnnnnnnnnnnnnnnnnnnnnnnnnnnnnnnnnnnnnnnnnnnnnnnnnnnnnnnnnnnnnnnnnnnnnnnnnnnnnnnnnnnnnnnnnnnnnnnnnnnnnnnnnnnnnnnnnnnnnnnnnnnnnnnnnnnnnnnnnnnnnnnnnnnnnnnnnnnnnnnnnnnnnnnnnnnnnnnnnnnnnnnnnnnnnnnnnnnnnnnnnnnnnnnnnnnnnnnnnnnnnnnnnnnnnnnnnnnnnnnnnnnnnnnnnnnnnnnnnnnnnnnnnnnnnnnnnnnnnnnnnnnnnnnnnnnnnnnnnnnnnnnnnnnnnnnnnnnnnnnnnnnnnnnnnnnnnnnnnnnnnnnnnnnnnnnnnnnnnnnnnnnnnnnnnnnnnnnnnnnnnnnnnnnnnnnnnnnnnnnnnnnnnnnnnnnnnnnnnnnnnnnnnnnnnnnnnnnnnnnnnnnnnnnnnnnnnnnnnnnnnnnnnnnnnnnnnnnnnnnnnnnnnnnnnnnnnnnnnnnnnnnnnnnnnnnnnnnnnnnnnnnnnnnnnnnnnnnnnnnnnnnnnnnnnnnnnnnnnnnnnnnnnnnnnnnnnnnnnnnnnnnnnnnnnnnnnnnnnnnnnnnnnnnnnnnnnnnnnnnnnnnnnnnnnnnnnnnnnnnnnnnnnnnnnnnnnnnnnnnnnnnnnnnnnnnnnnnnnnnnnnnnnnnnnnnnnnnnnnnnnnnnnnnnnnnnnnnnnnnnnnnnnnnnnnnnnnnnnnnnnnnnnnnnnnnnnnnnnnnnnnnnnnnnnnnnnnnnnnnnnnnnnnnnnnnnnnnnnnnnnnnnnnnnnnnnnnnnnnnnnnnnnnnnnnnnnnnnnnnnnnnnnnnnnnnnnnnnnnnnnnnnnnnnnnnnnnnnnnnnnnnnnnnnnnnnnnnnnnnnnnnnnnnnnnnnnnnnnnnnnnnnnnnnnnnnnnnnnnnnnnnnnnnnnnnnnnnnnnnnnnnnnnnnnnnnnnnnnnnnnnnnnnnnnnnnnnnnnnnnnnnnnnnnnnnnnnnnnnnnnnnnnnnnnnnnnnnnnnnnnnnnnnnnnnnnnnnnnnnnnnnnnnnnnnnnnnnnnnnnnnnnnnnnnnnnnnnnnnnnnnnnnnnnnnnnnnnnnnnnnnnnnnnnnnnnnnnnnnnnnnnnnnnnnnnnnnnnnnnnnnnnnnnnnnnnnnnnnnnnnnnnnnnnnnnnnnnnnnnnnnnnnnnnnnnnnnnnnnnnnnnnnnnnnnnnnnnnnnnnnnnnnnnnnnnnnnnnnnnnnnnnnnnnnnnnnnnnnnnnnnnnnnnnnnnnnnnnnnnnnnnnnnnnnnnnnnnnnnnnnnnnnnnnnnnnnnnnnnnnnnnnnnnnnnnnnnnnnnnnnnnnnnnnnnnnnnnnnnnnnnnnnnnnnnnnnnnnnnnnnnnnnnnnnnnnnnnnnnnnnnnnnnnnnnnnnnnnnnnnnnnnnnnnnnnnnnnnnnnnnnnnnnnnnnnnnnnnnnnnnnnnnnnnnnnnnnnnnnnnnnnnnnnnnnnnnnnnnnnnnnnnnnnnnnnnnnnnnnnnnnnnnnnnnnnnnnnnnnnnnnnnnnnnnnnnnnnnnnnnnnnnnnnnnnnnnnnnnnnnnnnnnnnnnnnnnnnnnnnnnnnnnnnnnnnnnnnnnnnnnnnnnnnnnnnnnnnnnnnnnnnnnnnnnnnnnnnnnnnnnnnnnnnnnnnnnnnnnnnnnnnnnnnnnnnnnnnnnnnnnnnnnnnnnnnnnnnnnnnnnnnnnnnnnnnnnnnnnnnnnnnnnnnnnnnnnnnnnnnnnnnnnnnnnnnnnnnnnnnnnnnnnnnnnnnnnnnnnnnnnnnnnnnnnnnnnnnnnnnnnnnnnnnnnnnnnnnnnnnnnnnnnnnnnnnnnnnnnnnnnnnnnnnnnnnnnnnnnnnnnnnnnnnnnnnnnnnnnnnnnnnnnnnnnnnnnnnnnnnnnnnnnnnnnnnnnnnnnnnnnnnnnnnnnnnnnnnnnnnnnnnnnnnnnnnnnnnnnnnnnnnnnnnnnnnnnnnnnnnnnnnnnnnnnnnnnnnnnnnnnnnnnnnnnnnnnnnnnnnnnnnnnnnnnnnnnnnnnnnnnnnnnnnnnnnnnnnnnnnnnnnnnnnnnnnnnnnnnnnnnnnnnnnnnnnnnnnnnnnnnnnnnnnnnnnnnnnnnnnnnnnnnnnnnnnnnnnnnnnnnnnnnnnnnnnnnnnnnnnnnnnnnnnnnnnnnnnnnnnnnnnnnnnnnnnnnnnnnnnnnnnnnnnnnnnnnnnnnnnnnnnnnnnnnnnnnnnnnnnnnnnnnnnnnnnnnnnnnnnnnnnnnnnnnnnnnnnnnnnnnnnnnnnnnnnnnnnnnnnnnnnnnnnnnnnnnnnnnnnnnnnnnnnnnnnnnnnnnnnnnnnnnnnnnnnnnnnnnnnnnnnnnnnnnnnnnnnnnnnnnnnnnnnnnnnnnnnnnnnnnnnnnnnnnnnnnnnnnnnnnnnnnnnnnnnnnnnnnnnnnnnnnnnnnnnnnnnnnnnnnnnnnnnnnnnnnnnnnnnnnnnnnnnnnnnnnnnnnnnnnnnnnnnnnnnnnnnnnnnnnnnnnnnnnnnnnnnnnnnnnnnnnnnnnnnnnnnnnnnnnnnnnnnnnnnnnnnnnnnnnnnnnnnnnnnnnnnnnnnnnnnnnnnnnnnnnnnnnnnnnnnnnnnnnnnnnnnnnnnnnnnnnnnnnnnnnnnnnnnnnnnnnnnnnnnnnnnnnnnnnnnnnnnnnnnnnnnnnnnnnnnnnnnnnnnnnnnnnnnnnnnnnnnnnnnnnnnnnnnnnnnnnnnnnnnnnnnnnnnnnnnnnnnnnnnnnnnnnnnnnnnnnnnnnnnnnnnnnnnnnnnnnnnnnnnnnnnnnnnnnnnnnnnnnnnnnnnnnnnnnnnnnnnnnnnnnnnnnnnnnnnnnnnnnnnnnnnnnnnnnnnnnnnnnnnnnnnnnnnnnnnnnnnnnnnnnnnnnnnnnnnnnnnnnnnnnnnnnnnnnnnnnnnnnnnnnnnnnnnnnnnnnnnnnnnnnnnnnnnnnnnnnnnnnnnnnnnnnnnnnnnnnnnnnnnnnnnnnnnnnnnnnnnnnnnnnnnnnnnnnnnnnnnnnnnnnnnnnnnnnnnnnnnnnnnnnnnnnnnnnnnnnnnnnnnnnnnnnnnnnnnnnnnnnnnnnnnnnnnnnnnnnnnnnnnnnnnnnnnnnnnnnnnnnnnnnnnnnnnnnnnnnnnnnnnnnnnnnnnnnnnnnnnnnnnnnnnnnnnnnnnnnnnnnnnnnnnnnnnnnnnnnnnnnnnnnnnnnnnnnnnnnnnnnnnnnnnnnnnnnnnnnnnnnnnnnnnnnnnnnnnnnnnnnnnnnnnnnnnnnnnnnnnnnnnnnnnnnnnnnnnnnnnnnnnnnnnnnnnnnnnnnnnnnnnnnnnnnnnnnnnnnnnnnnnnnnnnnnnnnnnnnnnnnnnnnnnnnnnnnnnnnnnnnnnnnnnnnnnnnnnnnnnnnnnnnnnnnnnnnnnnnnnnnnnnnnnnnnnnnnnnnnnnnnnnnnnnnnnnnnnnnnnnnnnnnnnnnnnnnnnnnnnnnnnnnnnnnnnnnnnnnnnnnnnnnnnnnnnnnnnnnnnnnnnnnnnnnnnnnnnnnnnnnnnnnnnnnnnnnnnnnnnnnnnnnnnnnnnnnnnnnnnnnnnnnnnnnnnnnnnnnnnnnnnnnnnnnnnnnnnnnnnnnnnnnnnnnnnnnnnnnnnnnnnnnnnnnnnnnnnnnnnnnnnnnnnnnnnnnnnnnnnnnnnnnnnnnnnnnnnnnnnnnnnnnnnnnnnnnnnnnnnnnnnnnnnnnnnnnnnnnnnnnnnnnnnnnnnnnnnnnnnnnnnnnnnnnnnnnnnnnnnnnnnnnnnnnnnnnnnnnnnnnnnnnnnnnnnnnnnnnnnnnnnnnnnnnnnnnnnnnnnnnnnnnnnnnnnnnnnnnnnnnnnnnnnnnnnnnnnnnnnnnnnnnnnnnnnnnnnnnnnnnnnnnnnnnnnnnnnnnnnnnnnnnnnnnnnnnnnnnnnnnnnnnnnnnnnnnnnnnnnnnnnnnnnnnnnnnnnnnnnnnnnnnnnnnnnnnnnnnnnnnnnnnnnnnnnnnnnnnnnnnnnnnnnnnnnnnnnnnnnnnnnnnnnnnnnnnnnnnnnnnnnnnnnnnnnnnnnnnnnnnnnnnnnnnnnnnnnnnnnnnnnnnnnnnnnnnnnnnnnnnnnnnnnnnnnnnnnnnnnnnnnnnnnnnnnnnnnnnnnnnnnnnnnnnnnnnnnnnnnnnnnnnnnnnnnnnnnnnnnnnnnnnnnnnnnnnnnnnnnnnnnnnnnnnnnnnnnnnnnnnnnnnnnnnnnnnnnnnnnnnnnnnnnnnnnnnnnnnnnnnnnnnnnnnnnnnnnnnnnnnnnnnnnnnnnnnnnnnnnnnnnnnnnnnnnnnnnnnnnnnnnnnnnnnnnnnnnnnnnnnnnnnnnnnnnnnnnnnnnnnnnnnnnnnnnnnnnnnnnnnnnnnnnnnnnnnnnnnnnnnnnnnnnnnnnnnnnnnnnnnnnnnnnnnnnnnnnnnnnnnnnnnnnnnnnnnnnnnnnnnnnnnnnnnnnnnnnnnnnnnnnnnnnnnnnnnnnnnnnnnnnnnnnnnnnnnnnnnnnnnnnnnnnnnnnnnnnnnnnnnnnnnnnnnnnnnnnnnnnnnnnnnnnnnnnnnnnnnnnnnnnnnnnnnnnnnnnnnnnnnnnnnnnnnnnnnnnnnnnnnnnnnnnnnnnnnnnnnnnnnnnnnnnnnnnnnnnnnnnnnnnnnnnnnnnnnnnnnnnnnnnnnnnnnnnnnnnnnnnnnnnnnnnnnnnnnnnnnnnnnnnnnnnnnnnnnnnnnnnnnnnnnnnnnnnnnnnnnnnnnnnnnnnnnnnnnnnnnnnnnnnnnnnnnnnnnnnnnnnnnnnnnnnnnnnnnnnnnnnnnnnnnnnnnnnnnnnnnnnnnnnnnnnnnnnnnnnnnnnnnnnnnnnnnnnnnnnnnnnnnnnnnnnnnnnnnnnnnnnnnnnnnnnnnnnnnnnnnnnnnnnnnnnnnnnnnnnnnnnnnnnnnnnnnnnnnnnnnnnnnnnnnnnnnnnnnnnnnnnnnnnnnnnnnnnnnnnnnnnnnnnnnnnnnnnnnnnnnnnnnnnnnnnnnnnnnnnnnnnnnnnnnnnnnnnnnnnnnnnnnnnnnnnnnnnnnnnnnnnnnnnnnnnnnnnnnnnnnnnnnnnnnnnnnnnnnnnnnnnnnnnnnnnnnnnnnnnnnnnnnnnnnnnnnnnnnnnnnnnnnnnnnnnnnnnnnnnnnnnnnnnnnnnnnnnnnnnnnnnnnnnnnnnnnnnnnnnnnnnnnnnnnnnnnnnnnnnnnnnnnnnnnnnnnnnnnnnnnnnnnnnnnnnnnnnnnnnnnnnnnnnnnnnnnnnnnnnnnnnnnnnnnnnnnnnnnnnnnnnnnnnnnnnnnnnnnnnnnnnnnnnnnnnnnnnnnnnnnnnnnnnnnnnnnnnnnnnnnnnnnnnnnnnnnnnnnnnnnnnnnnnnnnnnnnnnnnnnnnnnnnnnnnnnnnnnnnnnnnnnnnnnnnnnnnnnnnnnnnnnnnnnnnnnnnnnnnnnnnnnnnnnnnnnnnnnnnnnnnnnnnnnnnnnnnnnnnnnnnnnnnnnnnnnnnnnnnnnnnnnnnnnnnnnnnnnnnnnnnnnnnnnnnnnnnnnnnnnnnnnnnnnnnnnnnnnnnnnnnnnnnnnnnnnnnnnnnnnnnnnnnnnnnnnnnnnnnnnnnnnnnnnnnnnnnnnnnnnnnnnnnnnnnnnnnnnnnnnnnnnnnnnnnnnnnnnnnnnnnnnnnnnnnnnnnnnnnnnnnnnnnnnnnnnnnnnnnnnnnnnnnnnnnnnnnnnnnnnnnnnnnnnnnnnnnnnnnnnnnnnnnnnnnnnnnnnnnnnnnnnnnnnnnnnnnnnnnnnnnnnnnnnnnnnnnnnnnnnnnnnnnnnnnnnnnnnnnnnnnnnnnnnnnnnnnnnnnnnnnnnnnnnnnnnnnnnnnnnnnnnnnnnnnnnnnnnnnnnnnnnnnnnnnnnnnnnnnnnnnnnnnnnnnnnnnnnnnnnnnnnnnnnnnnnnnnnnnnnnnnnnnnnnnnnnnnnnnnnnnnnnnnnnnnnnnnnnnnnnnnnnnnnnnnnnnnnnnnnnnnnnnnnnnnnnnnnnnnnnnnnnnnnnnnnnnnnnnnnnnnnnnnnnnnnnnnnnnnnnnnnnnnnnnnnnnnnnnnnnnnnnnnnnnnnnnnnnnnnnnnnnnnnnnnnnnnnnnnnnnnnnnnnnnnnnnnnnnnnnnnnnnnnnnnnnnnnnnnnnnnnnnnnnnnnnnnnnnnnnnnnnnnnnnnnnnnnnnnnnnnnnnnnnnnnnnnnnnnnnnnnnnnnnnnnnnnnnnnnnnnnnnnnnnnnnnnnnnnnnnnnnnnnnnnnnnnnnnnnnnnnnnnnnnnnnnnnnnnnnnnnnnnnnnnnnnnnnnnnnnnnnnnnnnnnnnnnnnnnnnnnnnnnnnnnnnnnnnnnnnnnnnnnnnnnnnnnnnnnnnnnnnnnnnnnnnnnnnnnnnnnnnnnnnnnnnnnnnnnnnnnnnnnnnnnnnnnnnnnnnnnnnnnnnnnnnnnnnnnnnnnnnnnnnnnnnnnnnnnnnnnnnnnnnnnnnnnnnnnnnnnnnnnnnnnnnnnnnnnnnnnnnnnnnnnnnnnnnnnnnnnnnnnnnnnnnnnnnnnnnnnnnnnnnnnnnnnnnnnnnnnnnnnnnnnnnnnnnnnnnnnnnnnnnnnnnnnnnnnnnnnnnnnnnnnnnnnnnnnnnnnnnnnnnnnnnnnnnnnnnnnnnnnnnnnnnnnnnnnnnnnnnnnnnnnnnnnnnnnnnnnnnnnnnnnnnnnnnnnnnnnnnnnnnnnnnnnnnnnnnnnnnnnnnnnnnnnnnnnnnnnnnnnnnnnnnnnnnnnnnnnnnnnnnnnnnnnnnnnnnnnnnnnnnnnnnnnnnnnnnnnnnnnnnnnnnnnnnnnnnnnnnnnnnnnnnnnnnnnnnnnnnnnnnnnnnnnnnnnnnnnnnnnnnnnnnnnnnnnnnnnnnnnnnnnnnnnnnnnnnnnnnnnnnnnnnnnnnnnnnnnnnnnnnnnnnnnnnnnnnnnnnnnnnnnnnnnnnnnnnnnnnnnnnnnnnnnnnnnnnnnnnnnnnnnnnnnnnnnnnnnnnnnnnnnnnnnnnnnnnnnnnnnnnnnnnnnnnnnnnnnnnnnnnnnnnnnnnnnnnnnnnnnnnnnnnnnnnnnnnnnnnnnnnnnnnnnnnnnnnnnnnnnnnnnnnnnnnnnnnnnnnnnnnnnnnnnnnnnnnnnnnnnnnnnnnnnnnnnnnnnnnnnnnnnnnnnnnnnnnnnnnnnnnnnnnnnnnnnnnnnnnnnnnnnnnnnnnnnnnnnnnnnnnnnnnnnnnnnnnnnnnnnnnnnnnnnnnnnnnnnnnnnnnnnnnnnnnnnnnnnnnnnnnnnnnnnnnnnnnnnnnnnnnnnnnnnnnnnnnnnnnnnnnnnnnnnnnnnnnnnnnnnnnnnnnnnnnnnnnnnnnnnnnnnnnnnnnnnnnnnnnnnnnnnnnnnnnnnnnnnnnnnnnnnnnnnnnnnnnnnnnnnnnnnnnnnnnnnnnnnnnnnnnnnnnnnnnnnnnnnnnnnnnnnnnnnnnnnnnnnnnnnnnnnnnnnnnnnnnnnnnnnnnnnnnnnnnnnnnnnnnnnnnnnnnnnnnnnnnnnnnnnnnnnnnnnnnnnnnnnnnnnnnnnnnnnnnnnnnnnnnnnnnnnnnnnnnnnnnnnnnnnnnnnnnnnnnnnnnnnnnnnnnnnnnnnnnnnnnnnnnnnnnnnnnnnnnnnnnnnnnnnnnnnnnnnnnnnnnnnnnnnnnnnnnnnnnnnnnnnnnnnnnnnnnnnnnnnnnnnnnnnnnnnnnnnnnnnnnnnnnnnnnnnnnnnnnnnnnnnnnnnnnnnnnnnnnnnnnnnnnnnnnnnnnnnnnnnnnnnnnnnnnnnnnnnnnnnnnnnnnnnnnnnnnnnnnnnnnnnnnnnnnnnnnnnnnnnnnnnnnnnnnnnnnnnnnnnnnnnnnnnnnnnnnnnnnnnnnnnnnnnnnnnnnnnnnnnnnnnnnnnnnnnnnnnnnnnnnnnnnnnnnnnnnnnnnnnnnnnnnnnnnnnnnnnnnnnnnnnnnnnnnnnnnnnnnnnnnnnnnnnnnnnnnnnnnnnnnnnnnnnnnnnnnnnnnnnnnnnnnnnnnnnnnnnnnnnnnnnnnnnnnnnnnnnnnnnnnnnnnnnnnnnnnnnnnnnnnnnnnnnnnnnnnnnnnnnnnnnnnnnnnnnnnnnnnnnnnnnnnnnnnnnnnnnnnnnnnnnnnnnnnnnnnnnnnnnnnnnnnnnnnnnnnnnnnnnnnnnnnnnnnnnnnnnnnnnnnnnnnnnnnnnnnnnnnnnnnnnnnnnnnnnnnnnnnnnnnnnnnnnnnnnnnnnnnnnnnnnnnnnnnnnnnnnnnnnnnnnnnnnnnnnnnnnnnnnnnnnnnnnnnnnnnnnnnnnnnnnnnnnnnnnnnnnnnnnnnnnnnnnnnnnnnnnnnnnnnnnnnnnnnnnnnnnnnnnnnnnnnnnnnnnnnnnnnnnnnnnnnnnnnnnnnnnnnnnnnnnnnnnnnnnnnnnnnnnnnnnnnnnnnnnnnnnnnnnnnnnnnnnnnnnnnnnnnnnnnnnnnnnnnnnnnnnnnnnnnnnnnnnnnnnnnnnnnnnnnnnnnnnnnnnnnnnnnnnnnnnnnnnnnnnnnnnnnnnnnnnnnnnnnnnnnnnnnnnnnnnnnnnnnnnnnnnnnnnnnnnnnnnnnnnnnnnnnnnnnnnnnnnnnnnnnnnnnnnnnnnnnnnnnnnnnnnnnnnnnnnnnnnnnnnnnnnnnnnnnnnnnnnnnnnnnnnnnnnnnnnnnnnnnnnnnnnnnnnnnnnnnnnnnnnnnnnnnnnnnnnnnnnnnnnnnnnnnnnnnnnnnnnnnnnnnnnnnnnnnnnnnnnnnnnnnnnnnnnnnnnnnnnnnnnnnnnnnnnnnnnnnnnnnnnnnnnnnnnnnnnnnnnnnnnnnnnnnnnnnnnnnnnnnnnnnnnnnnnnnnnnnnnnnnnnnnnnnnnnnnnnnnnnnnnnnnnnnnnnnnnnnnnnnnnnnnnnnnnnnnnnnnnnnnnnnnnnnnnnnnnnnnnnnnnnnnnnnnnnnnnnnnnnnnnnnnnnnnnnnnnnnnnnnnnnnnnnnnnnnnnnnnnnnnnnnnnnnnnnnnnnnnnnnnnnnnnnnnnnnnnnnnnnnnnnnnnnnnnnnnnnnnnnnnnnnnnnnnnnnnnnnnnnnnnnnnnnnnnnnnnnnnnnnnnnnnnnnnnnnnnnnnnnnnnnnnnnnnnnnnnnnnnnnnnnnnnnnnnnnnnnnnnnnnnnnnnnnnnnnnnnnnnnnnnnnnnnnnnnnnnnnnnnnnnnnnnnnnnnnnnnnnnnnnnnnnnnnnnnnnnnnnnnnnnnnnnnnnnnnnnnnnnnnnnnnnnnnnnnnnnnnnnnnnnnnnnnnnnnnnnnnnnnnnnnnnnnnnnnnnnnnnnnnnnnnnnnnnnnnnnnnnnnnnnnnnnnnnnnnnnnnnnnnnnnnnnnnnnnnnnnnnnnnnnnnnnnnnnnnnnnnnnnnnnnnnnnnnnnnnnnnnnnnnnnnnnnnnnnnnnnnnnnnnnnnnnnnnnnnnnnnnnnnnnnnnnnnnnnnnnnnnnnnnnnnnnnnnnnnnnnnnnnnnnnnnnnnnnnnnnnnnnnnnnnnnnnnnnnnnnnnnnnnnnnnnnnnnnnnnnnnnnnnnnnnnnnnnnnnnnnnnnnnnnnnnnnnnnnnnnnnnnnnnnnnnnnnnnnnnnnnnnnnnnnnnnnnnnnnnnnnnnnnnnnnnnnnnnnnnnnnnnnnnnnnnnnnnnnnnnnnnnnnnnnnnnnnnnnnnnnnnnnnnnnnnnnnnnnnnnnnnnnnnnnnnnnnnnnnnnnnnnnnnnnnnnnnnnnnnnnnnnnnnnnnnnnnnnnnnnnnnnnnnnnnnnnnnnnnnnnnnnnnnnnnnnnnnnnnnnnnnnnnnnnnnnnnnnnnnnnnnnnnnnnnnnnnnnnnnnnnnnnnnnnnnnnnnnnnnnnnnnnnnnnnnnnnnnnnnnnnnnnnnnnnnnnnnnnnnnnnnnnnnnnnnnnnnnnnnnnnnnnnnnnnnnnnnnnnnnnnnnnnnnnnnnnnnnnnnnnnnnnnnnnnnnnnnnnnnnnnnnnnnnnnnnnnnnnnnnnnnnnnnnnnnnnnnnnnnnnnnnnnnnnnnnnnnnnnnnnnnnnnnnnnnnnnnnnnnnnnnnnnnnnnnnnnnnnnnnnnnnnnnnnnnnnnnnnnnnnnnnnnnnnnnnnnnnnnnnnnnnnnnnnnnnnnnnnnnnnnnnnnnnnnnnnnnnnnnnnnnnnnnnnnnnnnnnnnnnnnnnnnnnnnnnnnnnnnnnnnnnnnnnnnnnnnnnnnnnnnnnnnnnnnnnnnnnnnnnnnnnnnnnnnnnnnnnnnnnnnnnnnnnnnnnnnnnnnnnnnnnnnnnnnnnnnnnnnnnnnnnnnnnnnnnnnnnnnnnnnnnnnnnnnnnnnnnnnnnnnnnnnnnnnnnnnnnnnnnnnnnnnnnnnnnnnnnnnnnnnnnnnnnnnnnnnnnnnnnnnnnnnnnnnnnnnnnnnnnnnnnnnnnnnnnnnnnnnnnnnnnnnnnnnnnnnnnnnnnnnnnnnnnnnnnnnnnnnnnnnnnnnnnnnnnnnnnnnnnnnnnnnnnnnnnnnnnnnnnnnnnnnnnnnnnnnnnnnnnnnnnnnnnnnnnnnnnnnnnnnnnnnnnnnnnnnnnnnnnnnnnnnnnnnnnnnnnnnnnnnnnnnnnnnnnnnnnnnnnnnnnnnnnnnnnnnnnnnnnnnnnnnnnnnnnnnnnnnnnnnnnnnnnnnnnnnnnnnnnnnnnnnnnnnnnnnnnnnnnnnnnnnnnnnnnnnnnnnnnnnnnnnnnnnnnnnnnnnnnnnnnnnnnnnnnnnnnnnnnnnnnnnnnnnnnnnnnnnnnnnnnnnnnnnnnnnnnnnnnnnnnnnnnnnnnnnnnnnnnnnnnnnnnnnnnnnnnnnnnnnnnnnnnnnnnnnnnnnnnnnnnnnnnnnnnnnnnnnnnnnnnnnnnnnnnnnnnnnnnnnnnnnnnnnnnnnnnnnnnnnnnnnnnnnnnnnnnnnnnnnnnnnnnnnnnnnnnnnnnnnnnnnnnnnnnnnnnnnnnnnnnnnnnnnnnnnnnnnnnnnnnnnnnnnnnnnnnnnnnnnnnnnnnnnnnnnnnnnnnnnnnnnnnnnnnnnnnnnnnnnnnnnnnnnnnnnnnnnnnnnnnnnnnnnnnnnnnnnnnnnnnnnnnnnnnnnnnnnnnnnnnnnnnnnnnnnnnnnnnnnnnnnnnnnnnnnnnnnnnnnnnnnnnnnnnnnnnnnnnnnnnnnnnnnnnnnnnnnnnnnnnnnnnnnnnnnnnnnnnnnnnnnnnnnnnnnnnnnnnnnnnnnnnnnnnnnnnnnnnnnnnnnnnnnnnnnnnnnnnnnnnnnnnnnnnnnnnnnnnnnnnnnnnnnnnnnnnnnnnnnnnnnnnnnnnnnnnnnnnnnnnnnnnnnnnnnnnnnnnnnnnnnnnnnnnnnnnnnnnnnnnnnnnnnnnnnnnnnnnnnnnnnnnnnnnnnnnnnnnnnnnnnnnnnnnnnnnnnnnnnnnnnnnnnnnnnnnnnnnnnnnnnnnnnnnnnnnnnnnnnnnnnnnnnnnnnnnnnnnnnnnnnnnnnnnnnnnnnnnnnnnnnnnnnnnnnnnnnnnnnnnnnnnnnnnnnnnnnnnnnnnnnnnnnnnnnnnnnnnnnnnnnnnnnnnnnnnnnnnnnnnnnnnnnnnnnnnnnnnnnnnnnnnnnnnnnnnnnnnnnnnnnnnnnnnnnnnnnnnnnnnnnnnnnnnnnnnnnnnnnnnnnnnnnnnnnnnnnnnnnnnnnnnnnnnnnnnnnnnnnnnnnnnnnnnnnnnnnnnnnnnnnnnnnnnnnnnnnnnnnnnnnnnnnnnnnnnnnnnnnnnnnnnnnnnnnnnnnnnnnnnnnnnnnnnnnnnnnnnnnnnnnnnnnnnnnnnnnnnnnnnnnnnnnnnnnnnnnnnnnnnnnnnnnnnnnnnnnnnnnnnnnnnnnnnnnnnnnnnnnnnnnnnnnnnnnnnnnnnnnnnnnnnnnnnnnnnnnnnnnnnnnnnnnnnnnnnnnnnnnnnnnnnnnnnnnnnnnnnnnnnnnnnnnnnnnnnnnnnnnnnnnnnnnnnnnnnnnnnnnnnnnnnnnnnnnnnnnnnnnnnnnnnnnnnnnnnnnnnnnnnnnnnnnnnnnnnnnnnnnnnnnnnnnnnnnnnnnnnnnnnnnnnnnnnnnnnnnnnnnnnnnnnnnnnnnnnnnnnnnnnnnnnnnnnnnnnnnnnnnnnnnnnnnnnnnnnnnnnnnnnnnnnnnnnnnnnnnnnnnnnnnnnnnnnnnnnnnnnnnnnnnnnnnnnnnnnnnnnnnnnnnnnnnnnnnnnnnnnnnnnnnnnnnnnnnnnnnnnnnnnnnnnnnnnnnnnnnnnnnnnnnnnnnnnnnnnnnnnnnnnnnnnnnnnnnnnnnnnnnnnnnnnnnnnnnnnnnnnnnnnnnnnnnnnnnnnnnnnnnnnnnnnnnnnnnnnnnnnnnnnnnnnnnnnnnnnnnnnnnnnnnnnnnnnnnnnnnnnnnnnnnnnnnnnnnnnnnnnnnnnnnnnnnnnnnnnnnnnnnnnnnnnnnnnnnnnnnnnnnnnnnnnnnnnnnnnnnnnnnnnnnnnnnnnnnnnnnnnnnnnnnnnnnnnnnnnnnnnnnnnnnnnnnnnnnnnnnnnnnnnnnnnnnnnnnnnnnnnnnnnnnnnnnnnnnnnnnnnnnnnnnnnnnnnnnnnnnnnnnnnnnnnnnnnnnnnnnnnnnnnnnnnnnnnnnnnnnnnnnnnnnnnnnnnnnnnnnnnnnnnnnnnnnnnnnnnnnnnnnnnnnnnnnnnnnnnnnnnnnnnnnnnnnnnnnnnnnnnnnnnnnnnnnnnnnnnnnnnnnnnnnnnnnnnnnnnnnnnnnnnnnnnnnnnnnnnnnnnnnnnnnnnnnnnnnnnnnnnnnnnnnnnnnnnnnnnnnnnnnnnnnnnnnnnnnnnnnnnnnnnnnnnnnnnnnnnnnnnnnnnnnnnnnnnnnnnnnnnnnnnnnnnnnnnnnnnnnnnnnnnnnnnnnnnnnnnnnnnnnnnnnnnnnnnnnnnnnnnnnnnnnnnnnnnnnnnnnnnnnnnnnnnnnnnnnnnnnnnnnnnnnnnnnnnnnnnnnnnnnnnnnnnnnnnnnnnnnnnnnnnnnnnnnnnnnnnnnnnnnnnnnnnnnnnnnnnnnnnnnnnnnnnnnnnnnnnnnnnnnnnnnnnnnnnnnnnnnnnnnnnnnnnnnnnnnnnnnnnnnnnnnnnnnnnnnnnnnnnnnnnnnnnnnnnnnnnnnnnnnnnnnnnnnnnnnnnnnnnnnnnnnnnnnnnnnnnnnnnnnnnnnnnnnnnnnnnnnnnnnnnnnnnnnnnnnnnnnnnnnnnnnnnnnnnnnnnnnnnnnnnnnnnnnnnnnnnnnnnnnnnnnnnnnnnnnnnnnnnnnnnnnnnnnnnnnnnnnnnnnnnnnnnnnnnnnnnnnnnnnnnnnnnnnnnnnnnnnnnnnnnnnnnnnnnnnnnnnnnnnnnnnnnnnnnnnnnnnnnnnnnnnnnnnnnnnnnnnnnnnnnnnnnnnnnnnnnnnnnnnnnnnnnnnnnnnnnnnnnnnnnnnnnnnnnnnnnnnnnnnnnnnnnnnnnnnnnnnnnnnnnnnnnnnnnnnnnnnnnnnnnnnnnnnnnnnnnnnnnnnnnnnnnnnnnnnnnnnnnnnnnnnnnnnnnnnnnnnnnnnnnnnnnnnnnnnnnnnnnnnnnnnnnnnnnnnnnnnnnnnnnnnnnnnnnnnnnnnnnnnnnnnnnnnnnnnnnnnnnnnnnnnnnnnnnnnnnnnnnnnnnnnnnnnnnnnnnnnnnnnnnnnnnnnnnnnnnnnnnnnnnnnnnnnnnnnnnnnnnnnnnnnnnnnnnnnnnnnnnnnnnnnnnnnnnnnnnnnnnnnnnnnnnnnnnnnnnnnnnnnnnnnnnnnnnnnnnnnnnnnnnnnnnnnnnnnnnnnnnnnnnnnnnnnnnnnnnnnnnnnnnnnnnnnnnnnnnnnnnnnnnnnnnnnnnnnnnnnnnnnnnnnnnnnnnnnnnnnnnnnnnnnnnnnnnnnnnnnnnnnnnnnnnnnnnnnnnnnnnnnnnnnnnnnnnnnnnnnnnnnnnnnnnnnnnnnnnnnnnnnnnnnnnnnnnnnnnnnnnnnnnnnnnnnnnnnnnnnnnnnnnnnnnnnnnnnnnnnnnnnnnnnnnnnnnnnnnnnnnnnnnnnnnnnnnnnnnnnnnnnnnnnnnnnnnnnnnnnnnnnnnnnnnnnnnnnnnnnnnnnnnnnnnnnnnnnnnnnnnnnnnnnnnnnnnnnnnnnnnnnnnnnnnnnnnnnnnnnnnnnnnnnnnnnnnnnnnnnnnnnnnnnnnnnnnnnnnnnnnnnnnnnnnnnnnnnnnnnnnnnnnnnnnnnnnnnnnnnnnnnnnnnnnnnnnnnnnnnnnnnnnnnnnnnnnnnnnnnnnnnnnnnnnnnnnnnnnnnnnnnnnnnnnnnnnnnnnnnnnnnnnnnnnnnnnnnnnnnnnnnnnnnnnnnnnnnnnnnnnnnnnnnnnnnnnnnnnnnnnnnnnnnnnnnnnnnnnnnnnnnnnnnnnnnnnnnnnnnnnnnnnnnnnnnnnnnnnnnnnnnnnnnnnnnnnnnnnnnnnnnnnnnnnnnnnnnnnnnnnnnnnnnnnnnnnnnnnnnnnnnnnnnnnnnnnnnnnnnnnnnnnnnnnnnnnnnnnnnnnnnnnnnnnnnnnnnnnnnnnnnnnnnnnnnnnnnnnnnnnnnnnnnnnnnnnnnnnnnnnnnnnnnnnnnnnnnnnnnnnnnnnnnnnnnnnnnnnnnnnnnnnnnnnnnnnnnnnnnnnnnnnnnnnnnnnnnnnnnnnnnnnnnnnnnnnnnnnnnnnnnnnnnnnnnnnnnnnnnnnnnnnnnnnnnnnnnnnnnnnnnnnnnnnnnnnnnnnnnnnnnnnnnnnnnnnnnnnnnnnnnnnnnnnnnnnnnnnnnnnnnnnnnnnnnnnnnnnnnnnnnnnnnnnnnnnnnnnnnnnnnnnnnnnnnnnnnnnnnnnnnnnnnnnnnnnnnnnnnnnnnnnnnnnnnnnnnnnnnnnnnnnnnnnnnnnnnnnnnnnnnnnnnnnnnnnnnnnnnnnnnnnnnnnnnnnnnnnnnnnnnnnnnnnnnnnnnnnnnnnnnnnnnnnnnnnnnnnnnnnnnnnnnnnnnnnnnnnnnnnnnnnnnnnnnnnnnnnnnnnnnnnnnnnnnnnnnnnnnnnnnnnnnnnnnnnnnnnnnnnnnnnnnnnnnnnnnnnnnnnnnnnnnnnnnnnnnnnnnnnnnnnnnnnnnnnnnnnnnnnnnnnnnnnnnnnnnnnnnnnnnnnnnnnnnnnnnnnnnnnnnnnnnnnnnnnnnnnnnnnnnnnnnnnnnnnnnnnnnnnnnnnnnnnnnnnnnnnnnnnnnnnnnnnnnnnnnnnnnnnnnnnnnnnnnnnnnnnnnnnnnnnnnnnnnnnnnnnnnnnnnnnnnnnnnnnnnnnnnnnnnnnnnnnnnnnnnnnnnnnnnnnnnnnnnnnnnnnnnnnnnnnnnnnnnnnnnnnnnnnnnnnnnnnnnnnnnnnnnnnnnnnnnnnnnnnnnnnnnnnnnnnnnnnnnnnnnnnnnnnnnnnnnnnnnnnnnnnnnnnnnnnnnnnnnnnnnnnnnnnnnnnnnnnnnnnnnnnnnnnnnnnnnnnnnnnnnnnnnnnnnnnnnnnnnnnnnnnnnnnnnnnnnnnnnnnnnnnnnnnnnnnnnnnnnnnnnnnnnnnnnnnnnnnnnnnnnnnnnnnnnnnnnnnnnnnnnnnnnnnnnnnnnnnnnnnnnnnnnnnnnnnnnnnnnnnnnnnnnnnnnnnnnnnnnnnnnnnnnnnnnnnnnnnnnnnnnnnnnnnnnnnnnnnnnnnnnnnnnnnnnnnnnnnnnnnnnnnnnnnnnnnnnnnnnnnnnnnnnnnnnnnnnnnnnnnnnnnnnnnnnnnnnnnnnnnnnnnnnnnnnnnnnnnnnnnnnnnnnnnnnnnnnnnnnnnnnnnnnnnnnnnnnnnnnnnnnnnnnnnnnnnnnnnnnnnnnnnnnnnnnnnnnnnnnnnnnnnnnnnnnnnnnnnnnnnnnnnnnnnnnnnnnnnnnnnnnnnnnnnnnnnnnnnnnnnnnnnnnnnnnnnnnnnnnnnnnnnnnnnnnnnnnnnnnnnnnnnnnnnnnnnnnnnnnnnnnnnnnnnnnnnnnnnnnnnnnnnnnnnnnnnnnnnnnnnnnnnnnnnnnnnnnnnnnnnnnnnnnnnnnnnnnnnnnnnnnnnnnnnnnnnnnnnnnnnnnnnnnnnnnnnnnnnnnnnnnnnnnnnnnnnnnnnnnnnnnnnnnnnnnnnnnnnnnnnnnnnnnnnnnnnnnnnnnnnnnnnnnnnnnnnnnnnnnnnnnnnnnnnnnnnnnnnnnnnnnnnnnnnnnnnnnnnnnnnnnnnnnnnnnnnnnnnnnnnnnnnnnnnnnnnnnnnnnnnnnnnnnnnnnnnnnnnnnnnnnnnnnnnnnnnnnnnnnnnnnnnnnnnnnnnnnnnnnnnnnnnnnnnnnnnnnnnnnnnnnnnnnnnnnnnnnnnnnnnnnnnnnnnnnnnnnnnnnnnnnnnnnnnnnnnnnnnnnnnnnnnnnnnnnnnnnnnnnnnnnnnnnnnnnnnnnnnnnnnnnnnnnnnnnnnnnnnnnnnnnnnnnnnnnnnnnnnnnnnnnnnnnnnnnnnnnnnnnnnnnnnnnnnnnnnnnnnnnnnnnnnnnnnnnnnnnnnnnnnnnnnnnnnnnnnnnnnnnnnnnnnnnnnnnnnnnnnnnnnnnnnnnnnnnnnnnnnnnnnnnnnnnnnnnnnnnnnnnnnnnnnnnnnnnnnnnnnnnnnnnnnnnnnnnnnnnnnnnnnnnnnnnnnnnnnnnnnnnnnnnnnnnnnnnnnnnnnnnnnnnnnnnnnnnnnnnnnnnnnnnnnnnnnnnnnnnnnnnnnnnnnnnnnnnnnnnnnnnnnnnnnnnnnnnnnnnnnnnnnnnnnnnnnnnnnnnnnnnnnnnnnnnnnnnnnnnnnnnnnnnnnnnnnnnnnnnnnnnnnnnnnnnnnnnnnnnnnnnnnnnnnnnnnnnnnnnnnnnnnnnnnnnnnnnnnnnnnnnnnnnnnnnnnnnnnnnnnnnnnnnnnnnnnnnnnnnnnnnnnnnnnnnnnnnnnnnnnnnnnnnnnnnnnnnnnnnnnnnnnnnnnnnnnnnnnnnnnnnnnnnnnnnnnnnnnnnnnnnnnnnnnnnnnnnnnnnnnnnnnnnnnnnnnnnnnnnnnnnnnnnnnnnnnnnnnnnnnnnnnnnnnnnnnnnnnnnnnnnnnnnnnnnnnnnnnnnnnnnnnnnnnnnnnnnnnnnnnnnnnnnnnnnnnnnnnnnnnnnnnnnnnnnnnnnnnnnnnnnnnnnnnnnnnnnnnnnnnnnnnnnnnnnnnnnnnnnnnnnnnnnnnnnnnnnnnnnnnnnnnnnnnnnnnnnnnnnnnnnnnnnnnnnnnnnnnnnnnnnnnnnnnnnnnnnnnnnnnnnnnnnnnnnnnnnnnnnnnnnnnnnnnnnnnnnnnnnnnnnnnnnnnnnnnnnnnnnnnnnnnnnnnnnnnnnnnnnnnnnnnnnnnnnnnnnnnnnnnnnnnnnnnnnnnnnnnnnnnnnnnnnnnnnnnnnnnnnnnnnnnnnnnnnnnnnnnnnnnnnnnnnnnnnnnnnnnnnnnnnnnnnnnnnnnnnnnnnnnnnnnnnnnnnnnnnnnnnnnnnnnnnnnnnnnnnnnnnnnnnnnnnnnnnnnnnnnnnnnnnnnnnnnnnnnnnnnnnnnnnnnnnnnnnnnnnnnnnnnnnnnnnnnnnnnnnnnnnnnnnnnnnnnnnnnnnnnnnnnnnnnnnnnnnnnnnnnnnnnnnnnnnnnnnnnnnnnnnnnnnnnnnnnnnnnnnnnnnnnnnnnnnnnnnnnnnnnnnnnnnnnnnnnnnnnnnnnnnnnnnnnnnnnnnnnnnnnnnnnnnnnnnnnnnnnnnnnnnnnnnnnnnnnnnnnnnnnnnnnnnnnnnnnnnnnnnnnnnnnnnnnnnnnnnnnnnnnnnnnnnnnnnnnnnnnnnnnnnnnnnnnnnnnnnnnnnnnnnnnnnnnnnnnnnnnnnnnnnnnnnnnnnnnnnnnnnnnnnnnnnnnnnnnnnnnnnnnnnnnnnnnnnnnnnnnnnnnnnnnnnnnnnnnnnnnnnnnnnnnnnnnnnnnnnnnnnnnnnnnnnnnnnnnnnnnnnnnnnnnnnnnnnnnnnnnnnnnnnnnnnnnnnnnnnnnnnnnnnnnnnnnnnnnnnnnnnnnnnnnnnnnnnnnnnnnnnnnnnnnnnnnnnnnnnnnnnnnnnnnnnnnnnnnnnnnnnnnnnnnnnnnnnnnnnnnnnnnnnnnnnnnnnnnnnnnnnnnnnnnnnnnnnnnnnnnnnnnnnnnnnnnnnnnnnnnnnnnnnnnnnnnnnnnnnnnnnnnnnnnnnnnnnnnnnnnnnnnnnnnnnnnnnnnnnnnnnnnnnnnnnnnnnnnnnnnnnnnnnnnnnnnnnnnnnnnnnnnnnnnnnnnnnnnnnnnnnnnnnnnnnnnnnnnnnnnnnnnnnnnnnnnnnnnnnnnnnnnnnnnnnnnnnnnnnnnnnnnnnnnnnnnnnnnnnnnnnnnnnnnnnnnnnnnnnnnnnnnnnnnnnnnnnnnnnnnnnnnnnnnnnnnnnnnnnnnnnnnnnnnnnnnnnnnnnnnnnnnnnnnnnnnnnnnnnnnnnnnnnnnnnnnnnnnnnnnnnnnnnnnnnnnnnnnnnnnnnnnnnnnnnnnnnnnnnnnnnnnnnnnnnnnnnnnnnnnnnnnnnnnnnnnnnnnnnnnnnnnnnnnnnnnnnnnnnnnnnnnnnnnnnnnnnnnnnnnnnnnnnnnnnnnnnnnnnnnnnnnnnnnnnnnnnnnnnnnnnnnnnnnnnnnnnnnnnnnnnnnnnnnnnnnnnnnnnnnnnnnnnnnnnnnnnnnnnnnnnnnnnnnnnnnnnnnnnnnnnnnnnnnnnnnnnnnnnnnnnnnnnnnnnnnnnnnnnnnnnnnnnnnnnnnnnnnnnnnnnnnnnnnnnnnnnnnnnnnnnnnnnnnnnnnnnnnnnnnnnnnnnnnnnnnnnnnnnnnnnnnnnnnnnnnnnnnnnnnnnnnnnnnnnnnnnnnnnnnnnnnnnnnnnnnnnnnnnnnnnnnnnnnnnnnnnnnnnnnnnnnnnnnnnnnnnnnnnnnnnnnnnnnnnnnnnnnnnnnnnnnnnnnnnnnnnnnnnnnnnnnnnnnnnnnnnnnnnnnnnnnnnnnnnnnnnnnnnnnnnnnnnnnnnnnnnnnnnnnnnnnnnnnnnnnnnnnnnnnnnnnnnnnnnnnnnnnnnnnnnnnnnnnnnnnnnnnnnnnnnnnnnnnnnnnnnnnnnnnnnnnnnnnnnnnnnnnnnnnnnnnnnnnnnnnnnnnnnnnnnnnnnnnnnnnnnnnnnnnnnnnnnnnnnnnnnnnnnnnnnnnnnnnnnnnnnnnnnnnnnnnnnnnnnnnnnnnnnnnnnnnnnnnnnnnnnnnnnnnnnnnnnnnnnnnnnnnnnnnnnnnnnnnnnnnnnnnnnnnnnnnnnnnnnnnnnnnnnnnnnnnnnnnnnnnnnnnnnnnnnnnnnnnnnnnnnnnnnnnnnnnnnnnnnnnnnnnnnnnnnnnnnnnnnnnnnnnnnnnnnnnnnnnnnnnnnnnnnnnnnnnnnnnnnnnnnnnnnnnnnnnnnnnnnnnnnnnnnnnnnnnnnnnnnnnnnnnnnnnnnnnnnnnnnnnnnnnnnnnnnnnnnnnnnnnnnnnnnnnnnnnnnnnnnnnnnnnnnnnnnnnnnnnnnnnnnnnnnnnnnnnnnnnnnnnnnnnnnnnnnnnnnnnnnnnnnnnnnnnnnnnnnnnnnnnnnnnnnnnnnnnnnnnnnnnnnnnnnnnnnnnnnnnnnnnnnnnnnnnnnnnnnnnnnnnnnnnnnnnnnnnnnnnnnnnnnnnnnnnnnnnnnnnnnnnnnnnnnnnnnnnnnnnnnnnnnnnnnnnnnnnnnnnnnnnnnnnnnnnnnnnnnnnnnnnnnnnnnnnnnnnnnnnnnnnnnnnnnnnnnnnnnnnnnnnnnnnnnnnnnnnnnnnnnnnnnnnnnnnnnnnnnnnnnnnnnnnnnnnnnnnnnnnnnnnnnnnnnnnnnnnnnnnnnnnnnnnnnnnnnnnnnnnnnnnnnnnnnnnnnnnnnnnnnnnnnnnnnnnnnnnnnnnnnnnnnnnnnnnnnnnnnnnnnnnnnnnnnnnnnnnnnnnnnnnnnnnnnnnnnnnnnnnnnnnnnnnnnnnnnnnnnnnnnnnnnnnnnnnnnnnnnnnnnnnnnnnnnnnnnnnnnnnnnnnnnnnnnnnnnnnnnnnnnnnnnnnnnnnnnnnnnnnnnnnnnnnnnnnnnnnnnnnnnnnnnnnnnnnnnnnnnnnnnnnnnnnnnnnnnnnnnnnnnnnnnnnnnnnnnnnnnnnnnnnnnnnnnnnnnnnnnnnnnnnnnnnnnnnnnnnnnnnnnnnnnnnnnnnnnnnnnnnnnnnnnnnnnnnnnnnnnnnnnnnnnnnnnnnnnnnnnnnnnnnnnnnnnnnnnnnnnnnnnnnnnnnnnnnnnnnnnnnnnnnnnnnnnnnnnnnnnnnnnnnnnnnnnnnnnnnnnnnnnnnnnnnnnnnnnnnnnnnnnnnnnnnnnnnnnnnnnnnnnnnnnnnnnnnnnnnnnnnnnnnnnnnnnnnnnnnnnnnnnnnnnnnnnnnnnnnnnnnnnnnnnnnnnnnnnnnnnnnnnnnnnnnnnnnnnnnnnnnnnnnnnnnnnnnnnnnnnnnnnnnnnnnnnnnnnnnnnnnnnnnnnnnnnnnnnnnnnnnnnnnnnnnnnnnnnnnnnnnnnnnnnnnnnnnnnnnnnnnnnnnnnnnnnnnnnnnnnnnnnnnnnnnnnnnnnnnnnnnnnnnnnnnnnnnnnnnnnnnnnnnnnnnnnnnnnnnnnnnnnnnnnnnnnnnnnnnnnnnnnnnnnnnnnnnnnnnnnnnnnnnnnnnnnnnnnnnnnnnnnnnnnnnnnnnnnnnnnnnnnnnnnnnnnnnnnnnnnnnnnnnnnnnnnnnnnnnnnnnnnnnnnnnnnnnnnnnnnnnnnnnnnnnnnnnnnnnnnnnnnnnnnnnnnnnnnnnnnnnnnnnnnnnnnnnnnnnnnnnnnnnnnnnnnnnnnnnnnnnnnnnnnnnnnnnnnnnnnnnnnnnnnnnnnnnnnnnnnnnnnnnnnnnnnnnnnnnnnnnnnnnnnnnnnnnnnnnnnnnnnnnnnnnnnnnnnnnnnnnnnnnnnnnnnnnnnnnnnnnnnnnnnnnnnnnnnnnnnnnnnnnnnnnnnnnnnnnnnnnnnnnnnnnnnnnnnnnnnnnnnnnnnnnnnnnnnnnnnnnnnnnnnnnnnnnnnnnnnnnnnnnnnnnnnnnnnnnnnnnnnnnnnnnnnnnnnnnnnnnnnnnnnnnnnnnnnnnnnnnnnnnnnnnnnnnnnnnnnnnnnnnnnnnnnnnnnnnnnnnnnnnnnnnnnnnnnnnnnnnnnnnnnnnnnnnnnnnnnnnnnnnnnnnnnnnnnnnnnnnnnnnnnnnnnnnnnnnnnnnnnnnnnnnnnnnnnnnnnnnnnnnnnnnnnnnnnnnnnnnnnnnnnnnnnnnnnnnnnnnnnnnnnnnnnnnnnnnnnnnnnnnnnnnnnnnnnnnnnnnnnnnnnnnnnnnnnnnnnnnnnnnnnnnnnnnnnnnnnnnnnnnnnnnnnnnnnnnnnnnnnnnnnnnnnnnnnnnnnnnnnnnnnnnnnnnnnnnnnnnnnnnnnnnnnnnnnnnnnnnnnnnnnnnnnnnnnnnnnnnnnnnnnnnnnnnnnnnnnnnnnnnnnnnnnnnnnnnnnnnnnnnnnnnnnnnnnnnnnnnnnnnnnnnnnnnnnnnnnnnnnnnnnnnnnnnnnnnnnnnnnnnnnnnnnnnnnnnnnnnnnnnnnnnnnnnnnnnnnnnnnnnnnnnnnnnnnnnnnnnnnnnnnnnnnnnnnnnnnnnnnnnnnnnnnnnnnnnnnnnnnnnnnnnnnnnnnnnnnnnnnnnnnnnnnnnnnnnnnnnnnnnnnnnnnnnnnnnnnnnnnnnnnnnnnnnnnnnnnnnnnnnnnnnnnnnnnnnnnnnnnnnnnnnnnnnnnnnnnnnnnnnnnnnnnnnnnnnnnnnnnnnnnnnnnnnnnnnnnnnnnnnnnnnnnnnnnnnnnnnnnnnnnnnnnnnnnnnnnnnnnnnnnnnnnnnnnnnnnnnnnnnnnnnnnnnnnnnnnnnnnnnnnnnnnnnnnnnnnnnnnnnnnnnnnnnnnnnnnnnnnnnnnnnnnnnnnnnnnnnnnnnnnnnnnnnnnnnnnnnnnnnnnnnnnnnnnnnnnnnnnnnnnnnnnnnnnnnnnnnnnnnnnnnnnnnnnnnnnnnnnnnnnnnnnnnnnnnnnnnnnnnnnnnnnnnnnnnnnnnnnnnnnnnnnnnnnnnnnnnnnnnnnnnnnnnnnnnnnnnnnnnnnnnnnnnnnnnnnnnnnnnnnnnnnnnnnnnnnnnnnnnnnnnnnnnnnnnnnnnnnnnnnnnnnnnnnnnnnnnnnnnnnnnnnnnnnnnnnnnnnnnnnnnnnnnnnnnnnnnnnnnnnnnnnnnnnnnnnnnnnnnnnnnnnnnnnnnnnnnnnnnnnnnnnnnnnnnnnnnnnnnnnnnnnnnnnnnnnnnnnnnnnnnnnnnnnnnnnnnnnnnnnnnnnnnnnnnnnnnnnnnnnnnnnnnnnnnnnnnnnnnnnnnnnnnnnnnnnnnnnnnnnnnnnnnnnnnnnnnnnnnnnnnnnnnnnnnnnnnnnnnnnnnnnnnnnnnnnnnnnnnnnnnnnnnnnnnnnnnnnnnnnnnnnnnnnnnnnnnnnnnnnnnnnnnnnnnnnnnnnnnnnnnnnnnnnnnnnnnnnnnnnnnnnnnnnnnnnnnnnnnnnnnnnnnnnnnnnnnnnnnnnnnnnnnnnnnnnnnnnnnnnnnnnnnnnnnnnnnnnnnnnnnnnnnnnnnnnnnnnnnnnnnnnnnnnnnnnnnnnnnnnnnnnnnnnnnnnnnnnnnnnnnnnnnnnnnnnnnnnnnnnnnnnnnnnnnnnnnnnnnnnnnnnnnnnnnnnnnnnnnnnnnnnnnnnnnnnnnnnnnnnnnnnnnnnnnnnnnnnnnnnnnnnnnnnnnnnnnnnnnnnnnnnnnnnnnnnnnnnnnnnnnnnnnnnnnnnnnnnnnnnnnnnnnnnnnnnnnnnnnnnnnnnnnnnnnnnnnnnnnnnnnnnnnnnnnnnnnnnnnnnnnnnnnnnnnnnnnnnnnnnnnnnnnnnnnnnnnnnnnnnnnnnnnnnnnnnnnnnnnnnnnnnnnnnnnnnnnnnnnnnnnnnnnnnnnnnnnnnnnnnnnnnnnnnnnnnnnnnnnnnnnnnnnnnnnnnnnnnnnnnnnnnnnnnnnnnnnnnnnnnnnnnnnnnnnnnnnnnnnnnnnnnnnnnnnnnnnnnnnnnnnnnnnnnnnnnnnnnnnnnnnnnnnnnnnnnnnnnnnnnnnnnnnnnnnnnnnnnnnnnnnnnnnnnnnnnnnnnnnnnnnnnnnnnnnnnnnnnnnnnnnnnnnnnnnnnnnnnnnnnnnnnnnnnnnnnnnnnnnnnnnnnnnnnnnnnnnnnnnnnnnnnnnnnnnnnnnnnnnnnnnnnnnnnnnnnnnnnnnnnnnnnnnnnnnnnnnnnnnnnnnnnnnnnnnnnnnnnnnnnnnnnnnnnnnnnnnnnnnnnnnnnnnnnnnnnnnnnnnnnnnnnnnnnnnnnnnnnnnnnnnnnnnnnnnnnnnnnnnnnnnnnnnnnnnnnnnnnnnnnnnnnnnnnnnnnnnnnnnnnnnnnnnnnnnnnnnnnnnnnnnnnnnnnnnnnnnnnnnnnnnnnnnnnnnnnnnnnnnnnnnnnnnnnnnnnnnnnnnnnnnnnnnnnnnnnnnnnnnnnnnnnnnnnnnnnnnnnnnnnnnnnnnnnnnnnnnnnnnnnnnnnnnnnnnnnnnnnnnnnnnnnnnnnnnnnnnnnnnnnnnnnnnnnnnnnnnnnnnnnnnnnnnnnnnnnnnnnnnnnnnnnnnnnnnnnnnnnnnnnnnnnnnnnnnnnnnnnnnnnnnnnnnnnnnnnnnnnnnnnnnnnnnnnnnnnnnnnnnnnnnnnnnnnnnnnnnnnnnnnnnnnnnnnnnnnnnnnnnnnnnnnnnnnnnnnnnnnnnnnnnnnnnnnnnnnnnnnnnnnnnnnnnnnnnnnnnnnnnnnnnnnnnnnnnnnnnnnnnnnnnnnnnnnnnnnnnnnnnnnnnnnnnnnnnnnnnnnnnnnnnnnnnnnnnnnnnnnnnnnnnnnnnnnnnnnnnnnnnnnnnnnnnnnnnnnnnnnnnnnnnnnnnnnnnnnnnnnnnnnnnnnnnnnnnnnnnnnnnnnnnnnnnnnnnnnnnnnnnnnnnnnnnnnnnnnnnnnnnnnnnnnnnnnnnnnnnnnnnnnnnnnnnnnnnnnnnnnnnnnnnnnnnnnnnnnnnnnnnnnnnnnnnnnnnnnnnnnnnnnnnnnnnnnnnnnnnnnnnnnnnnnnnnnnnnnnnnnnnnnnnnnnnnnnnnnnnnnnnnnnnnnnnnnnnnnnnnnnnnnnnnnnnnnnnnnnnnnnnnnnnnnnnnnnnnnnnnnnnnnnnnnnnnnnnnnnnnnnnnnnnnnnnnnnnnnnnnnnnnnnnnnnnnnnnnnnnnnnnnnnnnnnnnnnnnnnnnnnnnnnnnnnnnnnnnnnnnnnnnnnnnnnnnnnnnnnnnnnnnnnnnnnnnnnnnnnnnnnnnnnnnnnnnnnnnnnnnnnnnnnnnnnnnnnnnnnnnnnnnnnnnnnnnnnnnnnnnnnnnnnnnnnnnnnnnnnnnnnnnnnnnnnnnnnnnnnnnnnnnnnnnnnnnnnnnnnnnnnnnnnnnnnnnnnnnnnnnnnnnnnnnnnnnnnnnnnnnnnnnnnnnnnnnnnnnnnnnnnnnnnnnnnnnnnnnnnnnnnnnnnnnnnnnnnnnnnnnnnnnnnnnnnnnnnnnnnnnnnnnnnnnnnnnnnnnnnnnnnnnnnnnnnnnnnnnnnnnnnnnnnnnnnnnnnnnnnnnnnnnnnnnnnnnnnnnnnnnnnnnnnnnnnnnnnnnnnnnnnnnnnnnnnnnnnnnnnnnnnnnnnnnnnnnnnnnnnnnnnnnnnnnnnnnnnnnnnnnnnnnnnnnnnnnnnnnnnnnnnnnnnnnnnnnnnnnnnnnnnnnnnnnnnnnnnnnnnnnnnnnnnnnnnnnnnnnnnnnnnnnnnnnnnnnnnnnnnnnnnnnnnnnnnnnnnnnnnnnnnnnnnnnnnnnnnnnnnnnnnnnnnnnnnnnnnnnnnnnnnnnnnnnnnnnnnnnnnnnnnnnnnnnnnnnnnnnnnnnnnnnnnnnnnnnnnnnnnnnnnnnnnnnnnnnnnnnnnnnnnnnnnnnnnnnnnnnnnnnnnnnnnnnnnnnnnnnnnnnnnnnnnnnnnnnnnnnnnnnnnnnnnnnnnnnnnnnnnnnnnnnnnnnnnnnnnnnnnnnnnnnnnnnnnnnnnnnnnnnnnnnnnnnnnnnnnnnnnnnnnnnnnnnnnnnnnnnnnnnnnnnnnnnnnnnnnnnnnnnnnnnnnnnnnnnnnnnnnnnnnnnnnnnnnnnnnnnnnnnnnnnnnnnnnnnnnnnnnnnnnnnnnnnnnnnnnnnnnnnnnnnnnnnnnnnnnnnnnnnnnnnnnnnnnnnnnnnnnnnnnnnnnnnnnnnnnnnnnnnnnnnnnnnnnnnnnnnnnnnnnnnnnnnnnnnnnnnnnnnnnnnnnnnnnnnnnnnnnnnnnnnnnnnnnnnnnnnnnnnnnnnnnnnnnnnnnnnnnnnnnnnnnnnnnnnnnnnnnnnnnnnnnnnnnnnnnnnnnnnnnnnnnnnnnnnnnnnnnnnnnnnnnnnnnnnnnnnnnnnnnnnnnnnnnnnnnnnnnnnnnnnnnnnnnnnnnnnnnnnnnnnnnnnnnnnnnnnnnnnnnnnnnnnnnnnnnnnnnnnnnnnnnnnnnnnnnnnnnnnnnnnnnnnnnnnnnnnnnnnnnnnnnnnnnnnnnnnnnnnnnnnnnnnnnnnnnnnnnnnnnnnnnnnnnnnnnnnnnnnnnnnnnnnnnnnnnnnnnnnnnnnnnnnnnnnnnnnnnnnnnnnnnnnnnnnnnnnnnnnnnnnnnnnnnnnnnnnnnnnnnnnnnnnnnnnnnnnnnnnnnnnnnnnnnnnnnnnnnnnnnnnnnnnnnnnnnnnnnnnnnnnnnnnnnnnnnnnnnnnnnnnnnnnnnnnnnnnnnnnnnnnnnnnnnnnnnnnnnnnnnnnnnnnnnnnnnnnnnnnnnnnnnnnnnnnnnnnnnnnnnnnnnnnnnnnnnnnnnnnnnnnnnnnnnnnnnnnnnnnnnnnnnnnnnnnnnnnnnnnnnnnnnnnnnnnnnnnnnnnnnnnnnnnnnnnnnnnnnnnnnnnnnnnnnnnnnnnnnnnnnnnnnnnnnnnnnnnnnnnnnnnnnnnnnnnnnnnnnnnnnnnnnnnnnnnnnnnnnnnnnnnnnnnnnnnnnnnnnnnnnnnnnnnnnnnnnnnnnnnnnnnnnnnnnnnnnnnnnnnnnnnnnnnnnnnnnnnnnnnnnnnnnnnnnnnnnnnnnnnnnnnnnnnnnnnnnnnnnnnnnnnnnnnnnnnnnnnnnnnnnnnnnnnnnnnnnnnnnnnnnnnnnnnnnnnnnnnnnnnnnnnnnnnnnnnnnnnnnnnnnnnnnnnnnnnnnnnnnnnnnnnnnnnnnnnnnnnnnnnnnnnnnnnnnnnnnnnnnnnnnnnnnnnnnnnnnnnnnnnnnnnnnnnnnnnnnnnnnnnnnnnnnnnnnnnnnnnnnnnnnnnnnnnnnnnnnnnnnnnnnnnnnnnnnnnnnnnnnnnnnnnnnnnnnnnnnnnnnnnnnnnnnnnnnnnnnnnnnnnnnnnnnnnnnnnnnnnnnnnnnnnnnnnnnnnnnnnnnnnnnnnnnnnnnnnnnnnnnnnnnnnnnnnnnnnnnnnnnnnnnnnnnnnnnnnnnnnnnnnnnnnnnnnnnnnnnnnnnnnnnnnnnnnnnnnnnnnnnnnnnnnnnnnnnnnnnnnnnnnnnnnnnnnnnnnnnnnnnnnnnnnnnnnnnnnnnnnnnnnnnnnnnnnnnnnnnnnnnnnnnnnnnnnnnnnnnnnnnnnnnnnnnnnnnnnnnnnnnnnnnnnnnnnnnnnnnnnnnnnnnnnnnnnnnnnnnnnnnnnnnnnnnnnnnnnnnnnnnnnnnnnnnnnnnnnnnnnnnnnnnnnnnnnnnnnnnnnnnnnnnnnnnnnnnnnnnnnnnnnnnnnnnnnnnnnnnnnnnnnnnnnnnnnnnnnnnnnnnnnnnnnnnnnnnnnnnnnnnnnnnnnnnnnnnnnnnnnnnnnnnnnnnnnnnnnnnnnnnnnnnnnnnnnnnnnnnnnnnnnnnnnnnnnnnnnnnnnnnnnnnnnnnnnnnnnnnnnnnnnnnnnnnnnnnnnnnnnnnnnnnnnnnnnnnnnnnnnnnnnnnnnnnnnnnnnnnnnnnnnnnnnnnnnnnnnnnnnnnnnnnnnnnnnnnnnnnnnnnnnnnnnnnnnnnnnnnnnnnnnnnnnnnnnnnnnnnnnnnnnnnnnnnnnnnnnnnnnnnnnnnnnnnnnnnnnnnnnnnnnnnnnnnnnnnnnnnnnnnnnnnnnnnnnnnnnnnnnnnnnnnnnnnnnnnnnnnnnnnnnnnnnnnnnnnnnnnnnnnnnnnnnnnnnnnnnnnnnnnnnnnnnnnnnnnnnnnnnnnnnnnnnnnnnnnnnnnnnnnnnnnnnnnnnnnnnnnnnnnnnnnnnnnnnnnnnnnnnnnnnnnnnnnnnnnnnnnnnnnnnnnnnnnnnnnnnnnnnnnnnnnnnnnnnnnnnnnnnnnnnnnnnnnnnnnnnnnnnnnnnnnnnnnnnnnnnnnnnnnnnnnnnnnnnnnnnnnnnnnnnnnnnnnnnnnnnnnnnnnnnnnnnnnnnnnnnnnnnnnnnnnnnnnnnnnnnnnnnnnnnnnnnnnnnnnnnnnnnnnnnnnnnnnnnnnnnnnnnnnnnnnnnnnnnnnnnnnnnnnnnnnnnnnnnnnnnnnnnnnnnnnnnnnnnnnnnnnnnnnnnnnnnnnnnnnnnnnnnnnnnnnnnnnnnnnnnnnnnnnnnnnnnnnnnnnnnnnnnnnnnnnnnnnnnnnnnnnnnnnnnnnnnnnnnnnnnnnnnnnnnnnnnnnnnnnnnnnnnnnnnnnnnnnnnnnnnnnnnnnnnnnnnnnnnnnnnnnnnnnnnnnnnnnnnnnnnnnnnnnnnnnnnnnnnnnnnnnnnnnnnnnnnnnnnnnnnnnnnnnnnnnnnnnnnnnnnnnnnnnnnnnnnnnnnnnnnnnnnnnnnnnnnnnnnnnnnnnnnnnnnnnnnnnnnnnnnnnnnnnnnnnnnnnnnnnnnnnnnnnnnnnnnnnnnnnnnnnnnnnnnnnnnnnnnnnnnnnnnnnnnnnnnnnnnnnnnnnnnnnnnnnnnnnnnnnnnnnnnnnnnnnnnnnnnnnnnnnnnnnnnnnnnnnnnnnnnnnnnnnnnnnnnnnnnnnnnnnnnnnnnnnnnnnnnnnnnnnnnnnnnnnnnnnnnnnnnnnnnnnnnnnnnnnnnnnnnnnnnnnnnnnnnnnnnnnnnnnnnnnnnnnnnnnnnnnnnnnnnnnnnnnnnnnnnnnnnnnnnnnnnnnnnnnnnnnnnnnnnnnnnnnnnnnnnnnnnnnnnnnnnnnnnnnnnnnnnnnnnnnnnnnnnnnnnnnnnnnnnnnnnnnnnnnnnnnnnnnnnnnnnnnnnnnnnnnnnnnnnnnnnnnnnnnnnnnnnnnnnnnnnnnnnnnnnnnnnnnnnnnnnnnnnnnnnnnnnnnnnnnnnnnnnnnnnnnnnnnnnnnnnnnnnnnnnnnnnnnnnnnnnnnnnnnnnnnnnnnnnnnnnnnnnnnnnnnnnnnnnnnnnnnnnnnnnnnnnnnnnnnnnnnnnnnnnnnnnnnnnnnnnnnnnnnnnnnnnnnnnnnnnnnnnnnnnnnnnnnnnnnnnnnnnnnnnnnnnnnnnnnnnnnnnnnnnnnnnnnnnnnnnnnnnnnnnnnnnnnnnnnnnnnnnnnnnnnnnnnnnnnnnnnnnnnnnnnnnnnnnnnnnnnnnnnnnnnnnnnnnnnnnnnnnnnnnnnnnnnnnnnnnnnnnnnnnnnnnnnnnnnnnnnnnnnnnnnnnnnnnnnnnnnnnnnnnnnnnnnnnnnnnnnnnnnnnnnnnnnnnnnnnnnnnnnnnnnnnnnnnnnnnnnnnnnnnnnnnnnnnnnnnnnnnnnnnnnnnnnnnnnnnnnnnnnnnnnnnnnnnnnnnnnnnnnnnnnnnnnnnnnnnnnnnnnnnnnnnnnnnnnnnnnnnnnnnnnnnnnnnnnnnnnnnnnnnnnnnnnnnnnnnnnnnnnnnnnnnnnnnnnnnnnnnnnnnnnnnnnnnnnnnnnnnnnnnnnnnnnnnnnnnnnnnnnnnnnnnnnnnnnnnnnnnnnnnnnnnnnnnnnnnnnnnnnnnnnnnnnnnnnnnnnnnnnnnnnnnnnnnnnnnnnnnnnnnnnnnnnnnnnnnnnnnnnnnnnnnnnnnnnnnnnnnnnnnnnnnnnnnnnnnnnnnnnnnnnnnnnnnnnnnnnnnnnnnnnnnnnnnnnnnnnnnnnnnnnnnnnnnnnnnnnnnnnnnnnnnnnnnnnnnnnnnnnnnnnnnnnnnnnnnnnnnnnnnnnnnnnnnnnnnnnnnnnnnnnnnnnnnnnnnnnnnnnnnnnnnnnnnnnnnnnnnnnnnnnnnnnnnnnnnnnnnnnnnnnnnnnnnnnnnnnnnnnnnnnnnnnnnnnnnnnnnnnnnnnnnnnnnnnnnnnnnnnnnnnnnnnnnnnnnnnnnnnnnnnnnnnnnnnnnnnnnnnnnnnnnnnnnnnnnnnnnnnnnnnnnnnnnnnnnnnnnnnnnnnnnnnnnnnnnnnnnnnnnnnnnnnnnnnnnnnnnnnnnnnnnnnnnnnnnnnnnnnnnnnnnnnnnnnnnnnnnnnnnnnnnnnnnnnnnnnnnnnnnnnnnnnnnnnnnnnnnnnnnnnnnnnnnnnnnnnnnnnnnnnnnnnnnnnnnnnnnnnnnnnnnnnnnnnnnnnnnnnnnnnnnnnnnnnnnnnnnnnnnnnnnnnnnnnnnnnnnnnnnnnnnnnnnnnnnnnnnnnnnnnnnnnnnnnnnnnnnnnnnnnnnnnnnnnnnnnnnnnnnnnnnnnnnnnnnnnnnnnnnnnnnnnnnnnnnnnnnnnnnnnnnnnnnnnnnnnnnnnnnnnnnnnnnnnnnnnnnnnnnnnnnnnnnnnnnnnnnnnnnnnnnnnnnnnnnnnnnnnnnnnnnnnnnnnnnnnnnnnnnnnnnnnnnnnnnnnnnnnnnnnnnnnnnnnnnnnnnnnnnnnnnnnnnnnnnnnnnnnnnnnnnnnnnnnnnnnnnnnnnnnnnnnnnnnnnnnnnnnnnnnnnnnnnnnnnnnnnnnnnnnnnnnnnnnnnnnnnnnnnnnnnnnnnnnnnnnnnnnnnnnnnnnnnnnnnnnnnnnnnnnnnnnnnnnnnnnnnnnnnnnnnnnnnnnnnnnnnnnnnnnnnnnnnnnnnnnnnnnnnnnnnnnnnnnnnnnnnnnnnnnnnnnnnnnnnnnnnnnnnnnnnnnnnnnnnnnnnnnnnnnnnnnnnnnnnnnnnnnnnnnnnnnnnnnnnnnnnnnnnnnnnnnnnnnnnnnnnnnnnnnnnnnnnnnnnnnnnnnnnnnnnnnnnnnnnnnnnnnnnnnnnnnnnnnnnnnnnnnnnnnnnnnnnnnnnnnnnnnnnnnnnnnnnnnnnnnnnnnnnnnnnnnnnnnnnnnnnnnnnnnnnnnnnnnnnnnnnnnnnnnnnnnnnnnnnnnnnnnnnnnnnnnnnnnnnnnnnnnnnnnnnnnnnnnnnnnnnnnnnnnnnnnnnnnnnnnnnnnnnnnnnnnnnnnnnnnnnnnnnnnnnnnnnnnnnnnnnnnnnnnnnnnnnnnnnnnnnnnnnnnnnnnnnnnnnnnnnnnnnnnnnnnnnnnnnnnnnnnnnnnnnnnnnnnnnnnnnnnnnnnnnnnnnnnnnnnnnnnnnnnnnnnnnnnnnnnnnnnnnnnnnnnnnnnnnnnnnnnnnnnnnnnnnnnnnnnnnnnnnnnnnnnnnnnnnnnnnnnnnnnnnnnnnnnnnnnnnnnnnnnnnnnnnnnnnnnnnnnnnnnnnnnnnnnnnnnnnnnnnnnnnnnnnnnnnnnnnnnnnnnnnnnnnnnnnnnnnnnnnnnnnnnnnnnnnnnnnnnnnnnnnnnnnnnnnnnnnnnnnnnnnnnnnnnnnnnnnnnnnnnnnnnnnnnnnnnnnnnnnnnnnnnnnnnnnnnnnnnnnnnnnnnnnnnnnnnnnnnnnnnnnnnnnnnnnnnnnnnnnnnnnnnnnnnnnnnnnnnnnnnnnnnnnnnnnnnnnnnnnnnnnnnnnnnnnnnnnnnnnnnnnnnnnnnnnnnnnnnnnnnnnnnnnnnnnnnnnnnnnnnnnnnnnnnnnnnnnnnnnnnnnnnnnnnnnnnnnnnnnnnnnnnnnnnnnnnnnnnnnnnnnnnnnnnnnnnnnnnnnnnnnnnnnnnnnnnnnnnnnnnnnnnnnnnnnnnnnnnnnnnnnnnnnnnnnnnnnnnnnnnnnnnnnnnnnnnnnnnnnnnnnnnnnnnnnnnnnnnnnnnnnnnnnnnnnnnnnnnnnnnnnnnnnnnnnnnnnnnnnnnnnnnnnnnnnnnnnnnnnnnnnnnnnnnnnnnnnnnnnnnnnnnnnnnnnnnnnnnnnnnnnnnnnnnnnnnnnnnnnnnnnnnnnnnnnnnnnnnnnnnnnnnnnnnnnnnnnnnnnnnnnnnnnnnnnnnnnnnnnnnnnnnnnnnnnnnnnnnnnnnnnnnnnnnnnnnnnnnnnnnnnnnnnnnnnnnnnnnnnnnnnnnnnnnnnnnnnnnnnnnnnnnnnnnnnnnnnnnnnnnnnnnnnnnnnnnnnnnnnnnnnnnnnnnnnnnnnnnnnnnnnnnnnnnnnnnnnnnnnnnnnnnnnnnnnnnnnnnnnnnnnnnnnnnnnnnnnnnnnnnnnnnnnnnnnnnnnnnnnnnnnnnnnnnnnnnnnnnnnnnnnnnnnnnnnnnnnnnnnnnnnnnnnnnnnnnnnnnnnnnnnnnnnnnnnnnnnnnnnnnnnnnnnnnnnnnnnnnnnnnnnnnnnnnnnnnnnnnnnnnnnnnnnnnnnnnnnnnnnnnnnnnnnnnnnnnnnnnnnnnnnnnnnnnnnnnnnnnnnnnnnnnnnnnnnnnnnnnnnnnnnnnnnnnnnnnnnnnnnnnnnnnnnnnnnnnnnnnnnnnnnnnnnnnnnnnnnnnnnnnnnnnnnnnnnnnnnnnnnnnnnnnnnnnnnnnnnnnnnnnnnnnnnnnnnnnnnnnnnnnnnnnnnnnnnnnnnnnnnnnnnnnnnnnnnnnnnnnnnnnnnnnnnnnnnnnnnnnnnnnnnnnnnnnnnnnnnnnnnnnnnnnnnnnnnnnnnnnnnnnnnnnnnnnnnnnnnnnnnnnnnnnnnnnnnnnnnnnnnnnnnnnnnnnnnnnnnnnnnnnnnnnnnnnnnnnnnnnnnnnnnnnnnnnnnnnnnnnnnnnnnnnnnnnnnnnnnnnnnnnnnnnnnnnnnnnnnnnnnnnnnnnnnnnnnnnnnnnnnnnnnnnnnnnnnnnnnnnnnnnnnnnnnnnnnnnnnnnnnnnnnnnnnnnnnnnnnnnnnnnnnnnnnnnnnnnnnnnnnnnnnnnnnnnnnnnnnnnnnnnnnnnnnnnnnnnnnnnnnnnnnnnnnnnnnnnnnnnnnnnnnnnnnnnnnnnnnnnnnnnnnnnnnnnnnnnnnnnnnnnnnnnnnnnnnnnnnnnnnnnnnnnnnnnnnnnnnnnnnnnnnnnnnnnnnnnnnnnnnnnnnnnnnnnnnnnnnnnnnnnnnnnnnnnnnnnnnnnnnnnnnnnnnnnnnnnnnnnnnnnnnnnnnnnnnnnnnnnnnnnnnnnnnnnnnnnnnnnnnnnnnnnnnnnnnnnnnnnnnnnnnnnnnnnnnnnnnnnnnnnnnnnnnnnnnnnnnnnnnnnnnnnnnnnnnnnnnnnnnnnnnnnnnnnnnnnnnnnnnnnnnnnnnnnnnnnnnnnnnnnnnnnnnnnnnnnnnnnnnnnnnnnnnnnnnnnnnnnnnnnnnnnnnnnnnnnnnnnnnnnnnnnnnnnnnnnnnnnnnnnnnnnnnnnnnnnnnnnnnnnnnnnnnnnnnnnnnnnnnnnnnnnnnnnnnnnnnnnnnnnnnnnnnnnnnnnnnnnnnnnnnnnnnnnnnnnnnnnnnnnnnnnnnnnnnnnnnnnnnnnnnnnnnnnnnnnnnnnnnnnnnnnnnnnnnnnnnnnnnnnnnnnnnnnnnnnnnnnnnnnnnnnnnnnnnnnnnnnnnnnnnnnnnnnnnnnnnnnnnnnnnnnnnnnnnnnnnnnnnnnnnnnnnnnnnnnnnnnnnnnnnnnnnnnnnnnnnnnnnnnnnnnnnnnnnnnnnnnnnnnnnnnnnnnnnnnnnnnnnnnnnnnnnnnnnnnnnnnnnnnnnnnnnnnnnnnnnnnnnnnnnnnnnnnnnnnnnnnnnnnnnnnnnnnnnnnnnnnnnnnnnnnnnnnnnnnnnnnnnnnnnnnnnnnnnnnnnnnnnnnnnnnnnnnnnnnnnnnnnnnnnnnnnnnnnnnnnnnnnnnnnnnnnnnnnnnnnnnnnnnnnnnnnnnnnnnnnnnnnnnnnnnnnnnnnnnnnnnnnnnnnnnnnnnnnnnnnnnnnnnnnnnnnnnnnnnnnnnnnnnnnnnnnnnnnnnnnnnnnnnnnnnnnnnnnnnnnnnnnnnnnnnnnnnnnnnnnnnnnnnnnnnnnnnnnnnnnnnnnnnnnnnnnnnnnnnnnnnnnnnnnnnnnnnnnnnnnnnnnnnnnnnnnnnnnnnnnnnnnnnnnnnnnnnnnnnnnnnnnnnnnnnnnnnnnnnnnnnnnnnnnnnnnnnnnnnnnnnnnnnnnnnnnnnnnnnnnnnnnnnnnnnnnnnnnnnnnnnnnnnnnnnnnnnnnnnnnnnnnnnnnnnnnnnnnnnnnnnnnnnnnnnnnnnnnnnnnnnnnnnnnnnnnnnnnnnnnnnnnnnnnnnnnnnnnnnnnnnnnnnnnnnnnnnnnnnnnnnnnnnnnnnnnnnnnnnnnnnnnnnnnnnnnnnnnnnnnnnnnnnnnnnnnnnnnnnnnnnnnnnnnnnnnnnnnnnnnnnnnnnnnnnnnnnnnnnnnnnnnnnnnnnnnnnnnnnnnnnnnnnnnnnnnnnnnnnnnnnnnnnnnnnnnnnnnnnnnnnnnnnnnnnnnnnnnnnnnnnnnnnnnnnnnnnnnnnnnnnnnnnnnnnnnnnnnnnnnnnnnnnnnnnnnnnnnnnnnnnnnnnnnnnnnnnnnnnnnnnnnnnnnnnnnnnnnnnnnnnnnnnnnnnnnnnnnnnnnnnnnnnnnnnnnnnnnnnnnnnnnnnnnnnnnnnnnnnnnnnnnnnnnnnnnnnnnnnnnnnnnnnnnnnnnnnnnnnnnnnnnnnnnnnnnnnnnnnnnnnnnnnnnnnnnnnnnnnnnnnnnnnnnnnnnnnnnnnnnnnnnnnnnnnnnnnnnnnnnnnnnnnnnnnnnnnnnnnnnnnnnnnnnnnnnnnnnnnnnnnnnnnnnnnnnnnnnnnnnnnnnnnnnnnnnnnnnnnnnnnnnnnnnnnnnnnnnnnnnnnnnnnnnnnnnnnnnnnnnnnnnnnnnnnnnnnnnnnnnnnnnnnnnnnnnnnnnnnnnnnnnnnnnnnnnnnnnnnnnnnnnnnnnnnnnnnnnnnnnnnnnnnnnnnnnnnnnnnnnnnnnnnnnnnnnnnnnnnnnnnnnnnnnnnnnnnnnnnnnnnnnnnnnnnnnnnnnnnnnnnnnnnnnnnnnnnnnnnnnnnnnnnnnnnnnnnnnnnnnnnnnnnnnnnnnnnnnnnnnnnnnnnnnnnnnnnnnnnnnnnnnnnnnnnnnnnnnnnnnnnnnnnnnnnnnnnnnnnnnnnnnnnnnnnnnnnnnnnnnnnnnnnnnnnnnnnnnnnnnnnnnnnnnnnnnnnnnnnnnnnnnnnnnnnnnnnnnnnnnnnnnnnnnnnnnnnnnnnnnnnnnnnnnnnnnnnnnnnnnnnnnnnnnnnnnnnnnnnnnnnnnnnnnnnnnnnnnnnnnnnnnnnnnnnnnnnnnnnnnnnnnnnnnnnnnnnnnnnnnnnnnnnnnnnnnnnnnnnnnnnnnnnnnnnnnnnnnnnnnnnnnnnnnnnnnnnnnnnnnnnnnnnnnnnnnnnnnnnnnnnnnnnnnnnnnnnnnnnnnnnnnnnnnnnnnnnnnnnnnnnnnnnnnnnnnnnnnnnnnnnnnnnnnnnnnnnnnnnnnnnnnnnnnnnnnnnnnnnnnnnnnnnnnnnnnnnnnnnnnnnnnnnnnnnnnnnnnnnnnnnnnnnnnnnnnnnnnnnnnnnnnnnnnnnnnnnnnnnnnnnnnnnnnnnnnnnnnnnnnnnnnnnnnnnnnnnnnnnnnnnnnnnnnnnnnnnnnnnnnnnnnnnnnnnnnnnnnnnnnnnnnnnnnnnnnnnnnnnnnnnnnnnnnnnnnnnnnnnnnnnnnnnnnnnnnnnnnnnnnnnnnnnnnnnnnnnnnnnnnnnnnnnnnnnnnnnnnnnnnnnnnnnnnnnnnnnnnnnnnnnnnnnnnnnnnnnnnnnnnnnnnnnnnnnnnnnnnnnnnnnnnnnnnnnnnnnnnnnnnnnnnnnnnnnnnnnnnnnnnnnnnnnnnnnnnnnnnnnnnnnnnnnnnnnnnnnnnnnnnnnnnnnnnnnnnnnnnnnnnnnnnnnnnnnnnnnnnnnnnnnnnnnnnnnnnnnnnnnnnnnnnnnnnnnnnnnnnnnnnnnnnnnnnnnnnnnnnnnnnnnnnnnnnnnnnnnnnnnnnnnnnnnnnnnnnnnnnnnnnnnnnnnnnnnnnnnnnnnnnnnnnnnnnnnnnnnnnnnnnnnnnnnnnnnnnnnnnnnnnnnnnnnnnnnnnnnnnnnnnnnnnnnnnnnnnnnnnnnnnnnnnnnnnnnnnnnnnnnnnnnnnnnnnnnnnnnnnnnnnnnnnnnnnnnnnnnnnnnnnnnnnnnnnnnnnnnnnnnnnnnnnnnnnnnnnnnnnnnnnnnnnnnnnnnnnnnnnnnnnnnnnnnnnnnnnnnnnnnnnnnnnnnnnnnnnnnnnnnnnnnnnnnnnnnnnnnnnnnnnnnnnnnnnnnnnnnnnnnnnnnnnnnnnnnnnnnnnnnnnnnnnnnnnnnnnnnnnnnnnnnnnnnnnnnnnnnnnnnnnnnnnnnnnnnnnnnnnnnnnnnnnnnnnnnnnnnnnnnnnnnnnnnnnnnnnnnnnnnnnnnnnnnnnnnnnnnnnnnnnnnnnnnnnnnnnnnnnnnnnnnnnnnnnnnnnnnnnnnnnnnnnnnnnnnnnnnnnnnnnnnnnnnnnnnnnnnnnnnnnnnnnnnnnnnnnnnnnnnnnnnnnnnnnnnnnnnnnnnnnnnnnnnnnnnnnnnnnnnnnnnnnnnnnnnnnnnnnnnnnnnnnnnnnnnnnnnnnnnnnnnnnnnnnnnnnnnnnnnnnnnnnnnnnnnnnnnnnnnnnnnnnnnnnnnnnnnnnnnnnnnnnnnnnnnnnnnnnnnnnnnnnnnnnnnnnnnnnnnnnnnnnnnnnnnnnnnnnnnnnnnnnnnnnnnnnnnnnnnnnnnnnnnnnnnnnnnnnnnnnnnnnnnnnnnnnnnnnnnnnnnnnnnnnnnnnnnnnnnnnnnnnnnnnnnnnnnnnnnnnnnnnnnnnnnnnnnnnnnnnnnnnnnnnnnnnnnnnnnnnnnnnnnnnnnnnnnnnnnnnnnnnnnnnnnnnnnnnnnnnnnnnnnnnnnnnnnnnnnnnnnnnnnnnnnnnnnnnnnnnnnnnnnnnnnnnnnnnnnnnnnnnnnnnnnnnnnnnnnnnnnnnnnnnnnnnnnnnnnnnnnnnnnnnnnnnnnnnnnnnnnnnnnnnnnnnnnnnnnnnnnnnnnnnnnnnnnnnnnnnnnnnnnnnnnnnnnnnnnnnnnnnnnnnnnnnnnnnnnnnnnnnnnnnnnnnnnnnnnnnnnnnnnnnnnnnnnnnnnnnnnnnnnnnnnnnnnnnnnnnnnnnnnnnnnnnnnnnnnnnnnnnnnnnnnnnnnnnnnnnnnnnnnnnnnnnnnnnnnnnnnnnnnnnnnnnnnnnnnnnnnnnnnnnnnnnnnnnnnnnnnnnnnnnnnnnnnnnnnnnnnnnnnnnnnnnnnnnnnnnnnnnnnnnnnnnnnnnnnnnnnnnnnnnnnnnnnnnnnnnnnnnnnnnnnnnnnnnnnnnnnnnnnnnnnnnnnnnnnnnnnnnnnnnnnnnnnnnnnnnnnnnnnnnnnnnnnnnnnnnnnnnnnnnnnnnnnnnnnnnnnnnnnnnnnnnnnnnnnnnnnnnnnnnnnnnnnnnnnnnnnnnnnnnnnnnnnnnnnnnnnnnnnnnnnnnnnnnnnnnnnnnnnnnnnnnnnnnnnnnnnnnnnnnnnnnnnnnnnnnnnnnnnnnnnnnnnnnnnnnnnnnnnnnnnnnnnnnnnnnnnnnnnnnnnnnnnnnnnnnnnnnnnnnnnnnnnnnnnnnnnnnnnnnnnnnnnnnnnnnnnnnnnnnnnnnnnnnnnnnnnnnnnnnnnnnnnnnnnnnnnnnnnnnnnnnnnnnnnnnnnnnnnnnnnnnnnnnnnnnnnnnnnnnnnnnnnnnnnnnnnnnnnnnnnnnnnnnnnnnnnnnnnnnnnnnnnnnnnnnnnnnnnnnnnnnnnnnnnnnnnnnnnnnnnnnnnnnnnnnnnnnnnnnnnnnnnnnnnnnnnnnnnnnnnnnnnnnnnnnnnnnnnnnnnnnnnnnnnnnnnnnnnnnnnnnnnnnnnnnnnnnnnnnnnnnnnnnnnnnnnnnnnnnnnnnnnnnnnnnnnnnnnnnnnnnnnnnnnnnnnnnnnnnnnnnnnnnnnnnnnnnnnnnnnnnnnnnnnnnnnnnnnnnnnnnnnnnnnnnnnnnnnnnnnnnnnnnnnnnnnnnnnnnnnnnnnnnnnnnnnnnnnnnnnnnnnnnnnnnnnnnnnnnnnnnnnnnnnnnnnnnnnnnnnnnnnnnnnnnnnnnnnnnnnnnnnnnnnnnnnnnnnnnnnnnnnnnnnnnnnnnnnnnnnnnnnnnnnnnnnnnnnnnnnnnnnnnnnnnnnnnnnnnnnnnnnnnnnnnnnnnnnnnnnnnnnnnnnnnnnnnnnnnnnnnnnnnnnnnnnnnnnnnnnnnnnnnnnnnnnnnnnnnnnnnnnnnnnnnnnnnnnnnnnnnnnnnnnnnnnnnnnnnnnnnnnnnnnnnnnnnnnnnnnnnnnnnnnnnnnnnnnnnnnnnnnnnnnnnnnnnnnnnnnnnnnnnnnnnnnnnnnnnnnnnnnnnnnnnnnnnnnnnnnnnnnnnnnnnnnnnnnnnnnnnnnnnnnnnnnnnnnnnnnnnnnnnnnnnnnnnnnnnnnnnnnnnnnnnnnnnnnnnnnnnnnnnnnnnnnnnnnnnnnnnnnnnnnnnnnnnnnnnnnnnnnnnnnnnnnnnnnnnnnnnnnnnnnnnnnnnnnnnnnnnnnnnnnnnnnnnnnnnnnnnnnnnnnnnnnnnnnnnnnnnnnnnnnnnnnnnnnnnnnnnnnnnnnnnnnnnnnnnnnnnnnnnnnnnnnnnnnnnnnnnnnnnnnnnnnnnnnnnnnnnnnnnnnnnnnnnnnnnnnnnnnnnnnnnnnnnnnnnnnnnnnnnnnnnnnnnnnnnnnnnnnnnnnnnnnnnnnnnnnnnnnnnnnnnnnnnnnnnnnnnnnnnnnnnnnnnnnnnnnnnnnnnnnnnnnnnnnnnnnnnnnnnnnnnnnnnnnnnnnnnnnnnnnnnnnnnnnnnnnnnnnnnnnnnnnnnnnnnnnnnnnnnnnnnnnnnnnnnnnnnnnnnnnnnnnnnnnnnnnnnnnnnnnnnnnnnnnnnnnnnnnnnnnnnnnnnnnnnnnnnnnnnnnnnnnnnnnnnnnnnnnnnnnnnnnnnnnnnnnnnnnnnnnnnnnnnnnnnnnnnnnnnnnnnnnnnnnnnnnnnnnnnnnnnnnnnnnnnnnnnnnnnnnnnnnnnnnnnnnnnnnnnnnnnnnnnnnnnnnnnnnnnnnnnnnnnnnnnnnnnnnnnnnnnnnnnnnnnnnnnnnnnnnnnnnnnnnnnnnnnnnnnnnnnnnnnnnnnnnnnnnnnnnnnnnnnnnnnnnnnnnnnnnnnnnnnnnnnnnnnnnnnnnnnnnnnnnnnnnnnnnnnnnnnnnnnnnnnnnnnnnnnnnnnnnnnnnnnnnnnnnnnnnnnnnnnnnnnnnnnnnnnnnnnnnnnnnnnnnnnnnnnnnnnnnnnnnnnnnnnnnnnnnnnnnnnnnnnnnnnnnnnnnnnnnnnnnnnnnnnnnnnnnnnnnnnnnnnnnnnnnnnnnnnnnnnnnnnnnnnnnnnnnnnnnnnnnnnnnnnnnnnnnnnnnnnnnnnnnnnnnnnnnnnnnnnnnnnnnnnnnnnnnnnnnnnnnnnnnnnnnnnnnnnnnnnnnnnnnnnnnnnnnnnnnnnnnnnnnnnnnnnnnnnnnnnnnnnnnnnnnnnnnnnnnnnnnnnnnnnnnnnnnnnnnnnnnnnnnnnnnnnnnnnnnnnnnnnnnnnnnnnnnnnnnnnnnnnnnnnnnnnnnnnnnnnnnnnnnnnnnnnnnnnnnnnnnnnnnnnnnnnnnnnnnnnnnnnnnnnnnnnnnnnnnnnnnnnnnnnnnnnnnnnnnnnnnnnnnnnnnnnnnnnnnnnnnnnnnnnnnnnnnnnnnnnnnnnnnnnnnnnnnnnnnnnnnnnnnnnnnnnnnnnnnnnnnnnnnnnnnnnnnnnnnnnnnnnnnnnnnnnnnnnnnnnnnnnnnnnnnnnnnnnnnnnnnnnnnnnnnnnnnnnnnnnnnnnnnnnnnnnnnnnnnnnnnnnnnnnnnnnnnnnnnnnnnnnnnnnnnnnnnnnnnnnnnnnnnnnnnnnnnnnnnnnnnnnnnnnnnnnnnnnnnnnnnnnnnnnnnnnnnnnnnnnnnnnnnnnnnnnnnnnnnnnnnnnnnnnnnnnnnnnnnnnnnnnnnnnnnnnnnnnnnnnnnnnnnnnnnnnnnnnnnnnnnnnnnnnnnnnnnnnnnnnnnnnnnnnnnnnnnnnnnnnnnnnnnnnnnnnnnnnnnnnnnnnnnnnnnnnnnnnnnnnnnnnnnnnnnnnnnnnnnnnnnnnnnnnnnnnnnnnnnnnnnnnnnnnnnnnnnnnnnnnnnnnnnnnnnnnnnnnnnnnnnnnnnnnnnnnnnnnnnnnnnnnnnnnnnnnnnnnnnnnnnnnnnnnnnnnnnnnnnnnnnnnnnnnnnnnnnnnnnnnnnnnnnnnnnnnnnnnnnnnnnnnnnnnnnnnnnnnnnnnnnnnnnnnnnnnnnnnnnnnnnnnnnnnnnnnnnnnnnnnnnnnnnnnnnnnnnnnnnnnnnnnnnnnnnnnnnnnnnnnnnnnnnnnnnnnnnnnnnnnnnnnnnnnnnnnnnnnnnnnnnnnnnnnnnnnnnnnnnnnnnnnnnnnnnnnnnnnnnnnnnnnnnnnnnnnnnnnnnnnnnnnnnnnnnnnnnnnnnnnnnnnnnnnnnnnnnnnnnnnnnnnnnnnnnnnnnnnnnnnnnnnnnnnnnnnnnnnnnnnnnnnnnnnnnnnnnnnnnnnnnnnnnnnnnnnnnnnnnnnnnnnnnnnnnnnnnnnnnnnnnnnnnnnnnnnnnnnnnnnnnnnnnnnnnnnnnnnnnnnnnnnnnnnnnnnnnnnnnnnnnnnnnnnnnnnnnnnnnnnnnnnnnnnnnnnnnnnnnnnnnnnnnnnnnnnnnnnnnnnnnnnnnnnnnnnnnnnnnnnnnnnnnnnnnnnnnnnnnnnnnnnnnnnnnnnnnnnnnnnnnnnnnnnnnnnnnnnnnnnnnnnnnnnnnnnnnnnnnnnnnnnnnnnnnnnnnnnnnnnnnnnnnnnnnnnnnnnnnnnnnnnnnnnnnnnnnnnnnnnnnnnnnnnnnnnnnnnnnnnnnnnnnnnnnnnnnnnnnnnnnnnnnnnnnnnnnnnnnnnnnnnnnnnnnnnnnnnnnnnnnnnnnnnnnnnnnnnnnnnnnnnnnnnnnnnnnnnnnnnnnnnnnnnnnnnnnnnnnnnnnnnnnnnnnnnnnnnnnnnnnnnnnnnnnnnnnnnnnnnnnnnnnnnnnnnnnnnnnnnnnnnnnnnnnnnnnnnnnnnnnnnnnnnnnnnnnnnnnnnnnnnnnnnnnnnnnnnnnnnnnnnnnnnnnnnnnnnnnnnnnnnnnnnnnnnnnnnnnnnnnnnnnnnnnnnnnnnnnnnnnnnnnnnnnnnnnnnnnnnnnnnnnnnnnnnnnnnnnnnnnnnnnnnnnnnnnnnnnnnnnnnnnnnnnnnnnnnnnnnnnnnnnnnnnnnnnnnnnnnnnnnnnnnnnnnnnnnnnnnnnnnnnnnnnnnnnnnnnnnnnnnnnnnnnnnnnnnnnnnnnnnnnnnnnnnnnnnnnnnnnnnnnnnnnnnnnnnnnnnnnnnnnnnnnnnnnnnnnnnnnnnnnnnnnnnnnnnnnnnnnnnnnnnnnnnnnnnnnnnnnnnnnnnnnnnnnnnnnnnnnnnnnnnnnnnnnnnnnnnnnnnnnnnnnnnnnnnnnnnnnnnnnnnnnnnnnnnnnnnnnnnnnnnnnnnnnnnnnnnnnnnnnnnnnnnnnnnnnnnnnnnnnnnnnnnnnnnnnnnnnnnnnnnnnnnnnnnnnnnnnnnnnnnnnnnnnnnnnnnnnnnnnnnnnnnnnnnnnnnnnnnnnnnnnnnnnnnnnnnnnnnnnnnnnnnnnnnnnnnnnnnnnnnnnnnnnnnnnnnnnnnnnnnnnnnnnnnnnnnnnnnnnnnnnnnnnnnnnnnnnnnnnnnnnnnnnnnnnnnnnnnnnnnnnnnnnnnnnnnnnnnnnnnnnnnnnnnnnnnnnnnnnnnnnnnnnnnnnnnnnnnnnnnnnnnnnnnnnnnnnnnnnnnnnnnnnnnnnnnnnnnnnnnnnnnnnnnnnnnnnnnnnnnnnnnnnnnnnnnnnnnnnnnnnnnnnnnnnnnnnnnnnnnnnnnnnnnnnnnnnnnnnnnnnnnnnnnnnnnnnnnnnnnnnnnnnnnnnnnnnnnnnnnnnnnnnnnnnnnnnnnnnnnnnnnnnnnnnnnnnnnnnnnnnnnnnnnnnnnnnnnnnnnnnnnnnnnnnnnnnnnnnnnnnnnnnnnnnnnnnnnnnnnnnnnnnnnnnnnnnnnnnnnnnnnnnnnnnnnnnnnnnnnnnnnnnnnnnnnnnnnnnnnnnnnnnnnnnnnnnnnnnnnnnnnnnnnnnnnnnnnnnnnnnnnnnnnnnnnnnnnnnnnnnnnnnnnnnnnnnnnnnnnnnnnnnnnnnnnnnnnnnnnnnnnnnnnnnnnnnnnnnnnnnnnnnnnnnnnnnnnnnnnnnnnnnnnnnnnnnnnnnnnnnnnnnnnnnnnnnnnnnnnnnnnnnnnnnnnnnnnnnnnnnnnnnnnnnnnnnnnnnnnnnnnnnnnnnnnnnnnnnnnnnnnnnnnnnnnnnnnnnnnnnnnnnnnnnnnnnnnnnnnnnnnnnnnnnnnnnnnnnnnnnnnnnnnnnnnnnnnnnnnnnnnnnnnnnnnnnnnnnnnnnnnnnnnnnnnnnnnnnnnnnnnnnnnnnnnnnnnnnnnnnnnnnnnnnnnnnnnnnnnnnnnnnnnnnnnnnnnnnnnnnnnnnnnnnnnnnnnnnnnnnnnnnnnnnnnnnnnnnnnnnnnnnnnnnnnnnnnnnnnnnnnnnnnnnnnnnnnnnnnnnnnnnnnnnnnnnnnnnnnnnnnnnnnnnnnnnnnnnnnnnnnnnnnnnnnnnnnnnnnnnnnnnnnnnnnnnnnnnnnnnnnnnnnnnnnnnnnnnnnnnnnnnnnnnnnnnnnnnnnnnnnnnnnnnnnnnnnnnnnnnnnnnnnnnnnnnnnnnnnnnnnnnnnnnnnnnnnnnnnnnnnnnnnnnnnnnnnnnnnnnnnnnnnnnnnnnnnnnnnnnnnnnnnnnnnnnnnnnnnnnnnnnnnnnnnnnnnnnnnnnnnnnnnnnnnnnnnnnnnnnnnnnnnnnnnnnnnnnnnnnnnnnnnnnnnnnnnnnnnnnnnnnnnnnnnnnnnnnnnnnnnnnnnnnnnnnnnnnnnnnnnnnnnnnnnnnnnnnnnnnnnnnnnnnnnnnnnnnnnnnnnnnnnnnnnnnnnnnnnnnnnnnnnnnnnnnnnnnnnnnnnnnnnnnnnnnnnnnnnnnnnnnnnnnnnnnnnnnnnnnnnnnnnnnnnnnnnnnnnnnnnnnnnnnnnnnnnnnnnnnnnnnnnnnnnnnnnnnnnnnnnnnnnnnnnnnnnnnnnnnnnnnnnnnnnnnnnnnnnnnnnnnnnnnnnnnnnnnnnnnnnnnnnnnnnnnnnnnnnnnnnnnnnnnnnnnnnnnnnnnnnnnnnnnnnnnnnnnnnnnnnnnnnnnnnnnnnnnnnnnnnnnnnnnnnnnnnnnnnnnnnnnnnnnnnnnnnnnnnnnnnnnnnnnnnnnnnnnnnnnnnnnnnnnnnnnnnnnnnnnnnnnnnnnnnnnnnnnnnnnnnnnnnnnnnnnnnnnnnnnnnnnnnnnnnnnnnnnnnnnnnnnnnnnnnnnnnnnnnnnnnnnnnnnnnnnnnnnnnnnnnnnnnnnnnnnnnnnnnnnnnnnnnnnnnnnnnnnnnnnnnnnnnnnnnnnnnnnnnnnnnnnnnnnnnnnnnnnnnnnnnnnnnnnnnnnnnnnnnnnnnnnnnnnnnnnnnnnnnnnnnnnnnnnnnnnnnnnnnnnnnnnnnnnnnnnnnnnnnnnnnnnnnnnnnnnnnnnnnnnnnnnnnnnnnnnnnnnnnnnnnnnnnnnnnnnnnnnnnnnnnnnnnnnnnnnnnnnnnnnnnnnnnnnnnnnnnnnnnnnnnnnnnnnnnnnnnnnnnnnnnnnnnnnnnnnnnnnnnnnnnnnnnnnnnnnnnnnnnnnnnnnnnnnnnnnnnnnnnnnnnnnnnnnnnnnnnnnnnnnnnnnnnnnnnnnnnnnnnnnnnnnnnnnnnnnnnnnnnnnnnnnnnnnnnnnnnnnnnnnnnnnnnnnnnnnnnnnnnnnnnnnnnnnnnnnnnnnnnnnnnnnnnnnnnnnnnnnnnnnnnnnnnnnnnnnnnnnnnnnnnnnnnnnnnnnnnnnnnnnnnnnnnnnnnnnnnnnnnnnnnnnnnnnnnnnnnnnnnnnnnnnnnnnnnnnnnnnnnnnnnnnnnnnnnnnnnnnnnnnnnnnnnnnnnnnnnnnnnnnnnnnnnnnnnnnnnnnnnnnnnnnnnnnnnnnnnnnnnnnnnnnnnnnnnnnnnnnnnnnnnnnnnnnnnnnnnnnnnnnnnnnnnnnnnnnnnnnnnnnnnnnnnnnnnnnnnnnnnnnnnnnnnnnnnnnnnnnnnnnnnnnnnnnnnnnnnnnnnnnnnnnnnnnnnnnnnnnnnnnnnnnnnnnnnnnnnnnnnnnnnnnnnnnnnnnnnnnnnnnnnnnnnnnnnnnnnnnnnnnnnnnnnnnnnnnnnnnnnnnnnnnnnnnnnnnnnnnnnnnnnnnnnnnnnnnnnnnnnnnnnnnnnnnnnnnnnnnnnnnnnnnnnnnnnnnnnnnnnnnnnnnnnnnnnnnnnnnnnnnnnnnnnnnnnnnnnnnnnnnnnnnnnnnnnnnnnnnnnnnnnnnnnnnnnnnnnnnnnnnnnnnnnnnnnnnnnnnnnnnnnnnnnnnnnnnnnnnnnnnnnnnnnnnnnnnnnnnnnnnnnnnnnnnnnnnnnnnnnnnnnnnnnnnnnnnnnnnnnnnnnnnnnnnnnnnnnnnnnnnnnnnnnnnnnnnnnnnnnnnnnnnnnnnnnnnnnnnnnnnnnnnnnnnnnnnnnnnnnnnnnnnnnnnnnnnnnnnnnnnnnnnnnnnnnnnnnnnnnnnnnnnnnnnnnnnnnnnnnnnnnnnnnnnnnnnnnnnnnnnnnnnnnnnnnnnnnnnnnnnnnnnnnnnnnnnnnnnnnnnnnnnnnnnnnnnnnnnnnnnnnnnnnnnnnnnnnnnnnnnnnnnnnnnnnnnnnnnnnnnnnnnnnnnnnnnnnnnnnnnnnnnnnnnnnnnnnnnnnnnnnnnnnnnnnnnnnnnnnnnnnnnnnnnnnnnnnnnnnnnnnnnnnnnnnnnnnnnnnnnnnnnnnnnnnnnnnnnnnnnnnnnnnnnnnnnnnnnnnnnnnnnnnnnnnnnnnnnnnnnnnnnnnnnnnnnnnnnnnnnnnnnnnnnnnnnnnnnnnnnnnnnnnnnnnnnnnnnnnnnnnnnnnnnnnnnnnnnnnnnnnnnnnnnnnnnnnnnnnnnnnnnnnnnnnnnnnnnnnnnnnnnnnnnnnnnnnnnnnnnnnnnnnnnnnnnnnnnnnnnnnnnnnnnnnnnnnnnnnnnnnnnnnnnnnnnnnnnnnnnnnnnnnnnnnnnnnnnnnnnnnnnnnnnnnnnnnnnnnnnnnnnnnnnnnnnnnnnnnnnnnnnnnnnnnnnnnnnnnnnnnnnnnnnnnnnnnnnnnnnnnnnnnnnnnnnnnnnnnnnnnnnnnnnnnnnnnnnnnnnnnnnnnnnnnnnnnnnnnnnnnnnnnnnnnnnnnnnnnnnnnnnnnnnnnnnnnnnnnnnnnnnnnnnnnnnnnnnnnnnnnnnnnnnnnnnnnnnnnnnnnnnnnnnnnnnnnnnnnnnnnnnnnnnnnnnnnnnnnnnnnnnnnnnnnnnnnnnnnnnnnnnnnnnnnnnnnnnnnnnnnnnnnnnnnnnnnnnnnnnnnnnnnnnnnnnnnnnnnnnnnnnnnnnnnnnnnnnnnnnnnnnnnnnnnnnnnnnnnnnnnnnnnnnnnnnnnnnnnnnnnnnnnnnnnnnnnnnnnnnnnnnnnnnnnnnnnnnnnnnnnnnnnnnnnnnnnnnnnnnnnnnnnnnnnnnnnnnnnnnnnnnnnnnnnnnnnnnnnnnnnnnnnnnnnnnnnnnnnnnnnnnnnnnnnnnnnnnnnnnnnnnnnnnnnnnnnnnnnnnnnnnnnnnnnnnnnnnnnnnnnnnnnnnnnnnnnnnnnnnnnnnnnnnnnnnnnnnnnnnnnnnnnnnnnnnnnnnnnnnnnnnnnnnnnnnnnnnnnnnnnnnnnnnnnnnnnnnnnnnnnnnnnnnnnnnnnnnnnnnnnnnnnnnnnnnnnnnnnnnnnnnnnnnnnnnnnnnnnnnnnnnnnnnnnnnnnnnnnnnnnnnnnnnnnnnnnnnnnnnnnnnnnnnnnnnnnnnnnnnnnnnnnnnnnnnnnnnnnnnnnnnnnnnnnnnnnnnnnnnnnnnnnnnnnnnnnnnnnnnnnnnnnnnnnnnnnnnnnnnnnnnnnnnnnnnnnnnnnnnnnnnnnnnnnnnnnnnnnnnnnnnnnnnnnnnnnnnnnnnnnnnnnnnnnnnnnnnnnnnnnnnnnnnnnnnnnnnnnnnnnnnnnnnnnnnnnnnnnnnnnnnnnnnnnnnnnnnnnnnnnnnnnnnnnnnnnnnnnnnnnnnnnnnnnnnnnnnnnnnnnnnnnnnnnnnnnnnnnnnnnnnnnnnnnnnnnnnnnnnnnnnnnnnnnnnnnnnnnnnnnnnnnnnnnnnnnnnnnnnnnnnnnnnnnnnnnnnnnnnnnnnnnnnnnnnnnnnnnnnnnnnnnnnnnnnnnnnnnnnnnnnnnnnnnnnnnnnnnnnnnnnnnnnnnnnnnnnnnnnnnnnnnnnnnnnnnnnnnnnnnnnnnnnnnnnnnnnnnnnnnnnnnnnnnnnnnnnnnnnnnnnnnnnnnnnnnnnnnnnnnnnnnnnnnnnnnnnnnnnnnnnnnnnnnnnnnnnnnnnnnnnnnnnnnnnnnnnnnnnnnnnnnnnnnnnnnnnnnnnnnnnnnnnnnnnnnnnnnnnnnnnnnnnnnnnnnnnnnnnnnnnnnnnnnnnnnnnnnnnnnnnnnnnnnnnnnnnnnnnnnnnnnnnnnnnnnnnnnnnnnnnnnnnnnnnnnnnnnnnnnnnnnnnnnnnnnnnnnnnnnnnnnnnnnnnnnnnnnnnnnnnnnnnnnnnnnnnnnnnnnnnnnnnnnnnnnnnnnnnnnnnnnnnnnnnnnnnnnnnnnnnnnnnnnnnnnnnnnnnnnnnnnnnnnnnnnnnnnnnnnnnnnnnnnnnnnnnnnnnnnnnnnnnnnnnnnnnnnnnnnnnnnnnnnnnnnnnnnnnnnnnnnnnnnnnnnnnnnnnnnnnnnnnnnnnnnnnnnnnnnnnnnnnnnnnnnnnnnnnnnnnnnnnnnnnnnnnnnnnnnnnnnnnnnnnnnnnnnnnnnnnnnnnnnnnnnnnnnnnnnnnnnnnnnnnnnnnnnnnnnnnnnnnnnnnnnnnnnnnnnnnnnnnnnnnnnnnnnnnnnnnnnnnnnnnnnnnnnnnnnnnnnnnnnnnnnnnnnnnnnnnnnnnnnnnnnnnnnnnnnnnnnnnnnnnnnnnnnnnnnnnnnnnnnnnnnnnnnnnnnnnnnnnnnnnnnnnnnnnnnnnnnnnnnnnnnnnnnnnnnnnnnnnnnnnnnnnnnnnnnnnnnnnnnnnnnnnnnnnnnnnnnnnnnnnnnnnnnnnnnnnnnnnnnnnnnnnnnnnnnnnnnnnnnnnnnnnnnnnnnnnnnnnnnnnnnnnnnnnnnnnnnnnnnnnnnnnnnnnnnnnnnnnnnnnnnnnnnnnnnnnnnnnnnnnnnnnnnnnnnnnnnnnnnnnnnnnnnnnnnnnnnnnnnnnnnnnnnnnnnnnnnnnnnnnnnnnnnnnnnnnnnnnnnnnnnnnnnnnnnnnnnnnnnnnnnnnnnnnnnnnnnnnnnnnnnnnnnnnnnnnnnnnnnnnnnnnnnnnnnnnnnnnnnnnnnnnnnnnnnnnnnnnnnnnnnnnnnnnnnnnnnnnnnnnnnnnnnnnnnnnnnnnnnnnnnnnnnnnnnnnnnnnnnnnnnnnnnnnnnnnnnnnnnnnnnnnnnnnnnnnnnnnnnnnnnnnnnnnnnnnnnnnnnnnnnnnnnnnnnnnnnnnnnnnnnnnnnnnnnnnnnnnnnnnnnnnnnnnnnnnnnnnnnnnnnnnnnnnnnnnnnnnnnnnnnnnnnnnnnnnnnnnnnnnnnnnnnnnnnnnnnnnnnnnnnnnnnnnnnnnnnnnnnnnnnnnnnnnnnnnnnnnnnnnnnnnnnnnnnnnnnnnnnnnnnnnnnnnnnnnnnnnnnnnnnnnnnnnnnnnnnnnnnnnnnnnnnnnnnnnnnnnnnnnnnnnnnnnnnnnnnnnnnnnnnnnnnnnnnnnnnnnnnnnnnnnnnnnnnnnnnnnnnnnnnnnnnnnnnnnnnnnnnnnnnnnnnnnnnnnnnnnnnnnnnnnnnnnnnnnnnnnnnnnnnnnnnnnnnnnnnnnnnnnnnnnnnnnnnnnnnnnnnnnnnnnnnnnnnnnnnnnnnnnnnnnnnnnnnnnnnnnnnnnnnnnnnnnnnnnnnnnnnnnnnnnnnnnnnnnnnnnnnnnnnnnnnnnnnnnnnnnnnnnnnnnnnnnnnnnnnnnnnnnnnnnnnnnnnnnnnnnnnnnnnnnnnnnnnnnnnnnnnnnnnnnnnnnnnnnnnnnnnnnnnnnnnnnnnnnnnnnnnnnnnnnnnnnnnnnnnnnnnnnnnnnnnnnnnnnnnnnnnnnnnnnnnnnnnnnnnnnnnnnnnnnnnnnnnnnnnnnnnnnnnnnnnnnnnnnnnnnnnnnnnnnnnnnnnnnnnnnnnnnnnnnnnnnnnnnnnnnnnnnnnnnnnnnnnnnnnnnnnnnnnnnnnnnnnnnnnnnnnnnnnnnnnnnnnnnnnnnnnnnnnnnnnnnnnnnnnnnnnnnnnnnnnnnnnnnnnnnnnnnnnnnnnnnnnnnnnnnnnnnnnnnnnnnnnnnnnnnnnnnnnnnnnnnnnnnnnnnnnnnnnnnnnnnnnnnnnnnnnnnnnnnnnnnnnnnnnnnnnnnnnnnnnnnnnnnnnnnnnnnnnnnnnnnnnnnnnnnnnnnnnnnnnnnnnnnnnnnnnnnnnnnnnnnnnnnnnnnnnnnnnnnnnnnnnnnnnnnnnnnnnnnnnnnnnnnnnnnnnnnnnnnnnnnnnnnnnnnnnnnnnnnnnnnnnnnnnnnnnnnnnnnnnnnnnnnnnnnnnnnnnnnnnnnnnnnnnnnnnnnnnnnnnnnnnnnnnnnnnnnnnnnnnnnnnnnnnnnnnnnnnnnnnnnnnnnnnnnnnnnnnnnnnnnnnnnnnnnnnnnnnnnnnnnnnnnnnnnnnnnnnnnnnnnnnnnnnnnnnnnnnnnnnnnnnnnnnnnnnnnnnnnnnnnnnnnnnnnnnnnnnnnnnnnnnnnnnnnnnnnnnnnnnnnnnnnnnnnnnnnnnnnnnnnnnnnnnnnnnnnnnnnnnnnnnnnnnnnnnnnnnnnnnnnnnnnnnnnnnnnnnnnnnnnnnnnnnnnnnnnnnnnnnnnnnnnnnnnnnnnnnnnnnnnnnnnnnnnnnnnnnnnnnnnnnnnnnnnnnnnnnnnnnnnnnnnnnnnnnnnnnnnnnnnnnnnnnnnnnnnnnnnnnnnnnnnnnnnnnnnnnnnnnnnnnnnnnnnnnnnnnnnnnnnnnnnnnnnnnnnnnnnnnnnnnnnnnnnnnnnnnnnnnnnnnnnnnnnnnnnnnnnnnnnnnnnnnnnnnnnnnnnnnnnnnnnnnnnnnnnnnnnnnnnnnnnnnnnnnnnnnnnnnnnnnnnnnnnnnnnnnnnnnnnnnnnnnnnnnnnnnnnnnnnnnnnnnnnnnnnnnnnnnnnnnnnnnnnnnnnnnnnnnnnnnnnnnnnnnnnnnnnnnnnnnnnnnnnnnnnnnnnnnnnnnnnnnnnnnnnnnnnnnnnnnnnnnnnnnnnnnnnnnnnnnnnnnnnnnnnnnnnnnnnnnnnnnnnnnnnnnnnnnnnnnnnnnnnnnnnnnnnnnnnnnnnnnnnnnnnnnnnnnnnnnnnnnnnnnnnnnnnnnnnnnnnnnnnnnnnnnnnnnnnnnnnnnnnnnnnnnnnnnnnnnnnnnnnnnnnnnnnnnnnnnnnnnnnnnnnnnnnnnnnnnnnnnnnnnnnnnnnnnnnnnnnnnnnnnnnnnnnnnnnnnnnnnnnnnnnnnnnnnnnnnnnnnnnnnnnnnnnnnnnnnnnnnnnnnnnnnnnnnnnnnnnnnnnnnnnnnnnnnnnnnnnnnnnnnnnnnnnnnnnnnnnnnnnnnnnnnnnnnnnnnnnnnnnnnnnnnnnnnnnnnnnnnnnnnnnnnnnnnnnnnnnnnnnnnnnnnnnnnnnnnnnnnnnnnnnnnnnnnnnnnnnnnnnnnnnnnnnnnnnnnnnnnnnnnnnnnnnnnnnnnnnnnnnnnnnnnnnnnnnnnnnnnnnnnnnnnnnnnnnnnnnnnnnnnnnnnnnnnnnnnnnnnnnnnnnnnnnnnnnnnnnnnnnnnnnnnnnnnnnnnnnnnnnnnnnnnnnnnnnnnnnnnnnnnnnnnnnnnnnnnnnnnnnnnnnnnnnnnnnnnnnnnnnnnnnnnnnnnnnnnnnnnnnnnnnnnnnnnnnnnnnnnnnnnnnnnnnnnnnnnnnnnnnnnnnnnnnnnnnnnnnnnnnnnnnnnnnnnnnnnnnnnnnnnnnnnnnnnnnnnnnnnnnnnnnnnnnnnnnnnnnnnnnnnnnnnnnnnnnnnnnnnnnnnnnnnnnnnnnnnnnnnnnnnnnnnnnnnnnnnnnnnnnnnnnnnnnnnnnnnnnnnnnnnnnnnnnnnnnnnnnnnnnnnnnnnnnnnnnnnnnnnnnnnnnnnnnnnnnnnnnnnnnnnnnnnnnnnnnnnnnnnnnnnnnnnnnnnnnnnnnnnnnnnnnnnnnnnnnnnnnnnnnnnnnnnnnnnnnnnnnnnnnnnnnnnnnnnnnnnnnnnnnnnnnnnnnnnnnnnnnnnnnnnnnnnnnnnnnnnnnnnnnnnnnnnnnnnnnnnnnnnnnnnnnnnnnnnnnnnnnnnnnnnnnnnnnnnnnnnnnnnnnnnnnnnnnnnnnnnnnnnnnnnnnnnnnnnnnnnnnnnnnnnnnnnnnnnnnnnnnnnnnnnnnnnnnnnnnnnnnnnnnnnnnnnnnnnnnnnnnnnnnnnnnnnnnnnnnnnnnnnnnnnnnnnnnnnnnnnnnnnnnnnnnnnnnnnnnnnnnnnnnnnnnnnnnnnnnnnnnnnnnnnnnnnnnnnnnnnnnnnnnnnnnnnnnnnnnnnnnnnnnnnnnnnnnnnnnnnnnnnnnnnnnnnnnnnnnnnnnnnnnnnnnnnnnnnnnnnnnnnnnnnnnnnnnnnnnnnnnnnnnnnnnnnnnnnnnnnnnnnnnnnnnnnnnnnnnnnnnnnnnnnnnnnnnnnnnnnnnnnnnnnnnnnnnnnnnnnnnnnnnnnnnnnnnnnnnnnnnnnnnnnnnnnnnnnnnnnnnnnnnnnnnnnnnnnnnnnnnnnnnnnnnnnnnnnnnnnnnnnnnnnnnnnnnnnnnnnnnnnnnnnnnnnnnnnnnnnnnnnnnnnnnnnnnnnnnnnnnnnnnnnnnnnnnnnnnnnnnnnnnnnnnnnnnnnnnnnnnnnnnnnnnnnnnnnnnnnnnnnnnnnnnnnnnnnnnnnnnnnnnnnnnnnnnnnnnnnnnnnnnnnnnnnnnnnnnnnnnnnnnnnnnnnnnnnnnnnnnnnnnnnnnnnnnnnnnnnnnnnnnnnnnnnnnnnnnnnnnnnnnnnnnnnnnnnnnnnnnnnnnnnnnnnnnnnnnnnnnnnnnnnnnnnnnnnnnnnnnnnnnnnnnnnnnnnnnnnnnnnnnnnnnnnnnnnnnnnnnnnnnnnnnnnnnnnnnnnnnnnnnnnnnnnnnnnnnnnnnnnnnnnnnnnnnnnnnnnnnnnnnnnnnnnnnnnnnnnnnnnnnnnnnnnnnnnnnnnnnnnnnnnnnnnnnnnnnnnnnnnnnnnnnnnnnnnnnnnnnnnnnnnnnnnnnnnnnnnnnnnnnnnnnnnnnnnnnnnnnnnnnnnnnnnnnnnnnnnnnnnnnnnnnnnnnnnnnnnnnnnnnnnnnnnnnnnnnnnnnnnnnnnnnnnnnnnnnnnnnnnnnnnnnnnnnnnnnnnnnnnnnnnnnnnnnnnnnnnnnnnnnnnnnnnnnnnnnnnnnnnnnnnnnnnnnnnnnnnnnnnnnnnnnnnnnnnnnnnnnnnnnnnnnnnnnnnnnnnnnnnnnnnnnnnnnnnnnnnnnnnnnnnnnnnnnnnnnnnnnnnnnnnnnnnnnnnnnnnnnnnnnnnnnnnnnnnnnnnnnnnnnnnnnnnnnnnnnnnnnnnnnnnnnnnnnnnnnnnnnnnnnnnnnnnnnnnnnnnnnnnnnnnnnnnnnnnnnnnnnnnnnnnnnnnnnnnnnnnnnnnnnnnnnnnnnnnnnnnnnnnnnnnnnnnnnnnnnnnnnnnnnnnnnnnnnnnnnnnnnnnnnnnnnnnnnnnnnnnnnnnnnnnnnnnnnnnnnnnnnnnnnnnnnnnnnnnnnnnnnnnnnnnnnnnnnnnnnnnnnnnnnnnnnnnnnnnnnnnnnnnnnnnnnnnnnnnnnnnnnnnnnnnnnnnnnnnnnnnnnnnnnnnnnnnnnnnnnnnnnnnnnnnnnnnnnnnnnnnnnnnnnnnnnnnnnnnnnnnnnnnnnnnnnnnnnnnnnnnnnnnnnnnnnnnnnnnnnnnnnnnnnnnnnnnnnnnnnnnnnnnnnnnnnnnnnnnnnnnnnnnnnnnnnnnnnnnnnnnnnnnnnnnnnnnnnnnnnnnnnnnnnnnnnnnnnnnnnnnnnnnnnnnnnnnnnnnnnnnnnnnnnnnnnnnnnnnnnnnnnnnnnnnnnnnnnnnnnnnnnnnnnnnnnnnnnnnnnnnnnnnnnnnnnnnnnnnnnnnnnnnnnnnnnnnnnnnnnnnnnnnnnnnnnnnnnnnnnnnnnnnnnnnnnnnnnnnnnnnnnnnnnnnnnnnnnnnnnnnnnnnnnnnnnnnnnnnnnnnnnnnnnnnnnnnnnnnnnnnnnnnnnnnnnnnnnnnnnnnnnnnnnnnnnnnnnnnnnnnnnnnnnnnnnnnnnnnnnnnnnnnnnnnnnnnnnnnnnnnnnnnnnnnnnnnnnnnnnnnnnnnnnnnnnnnnnnnnnnnnnnnnnnnnnnnnnnnnnnnnnnnnnnnnnnnnnnnnnnnnnnnnnnnnnnnnnnnnnnnnnnnnnnnnnnnnnnnnnnnnnnnnnnnnnnnnnnnnnnnnnnnnnnnnnnnnnnnnnnnnnnnnnnnnnnnnnnnnnnnnnnnnnnnnnnnnnnnnnnnnnnnnnnnnnnnnnnnnnnnnnnnnnnnnnnnnnnnnnnnnnnnnnnnnnnnnnnnnnnnnnnnnnnnnnnnnnnnnnnnnnnnnnnnnnnnnnnnnnnnnnnnnnnnnnnnnnnnnnnnnnnnnnnnnnnnnnnnnnnnnnnnnnnnnnnnnnnnnnnnnnnnnnnnnnnnnnnnnnnnnnnnnnnnnnnnnnnnnnnnnnnnnnnnnnnnnnnnnnnnnnnnnnnnnnnnnnnnnnnnnnnnnnnnnnnnnnnnnnnnnnnnnnnnnnnnnnnnnnnnnnnnnnnnnnnnnnnnnnnnnnnnnnnnnnnnnnnnnnnnnnnnnnnnnnnnnnnnnnnnnnnnnnnnnnnnnnnnnnnnnnnnnnnnnnnnnnnnnnnnnnnnnnnnnnnnnnnnnnnnnnnnnnnnnnnnnnnnnnnnnnnnnnnnnnnnnnnnnnnnnnnnnnnnnnnnnnnnnnnnnnnnnnnnnnnnnnnnnnnnnnnnnnnnnnnnnnnnnnnnnnnnnnnnnnnnnnnnnnnnnnnnnnnnnnnnnnnnnnnnnnnnnnnnnnnnnnnnnnnnnnnnnnnnnnnnnnnnnnnnnnnnnnnnnnnnnnnnnnnnnnnnnnnnnnnnnnnnnnnnnnnnnnnnnnnnnnnnnnnnnnnnnnnnnnnnnnnnnnnnnnnnnnnnnnnnnnnnnnnnnnnnnnnnnnnnnnnnnnnnnnnnnnnnnnnnnnnnnnnnnnnnnnnnnnnnnnnnnnnnnnnnnnnnnnnnnnnnnnnnnnnnnnnnnnnnnnnnnnnnnnnnnnnnnnnnnnnnnnnnnnnnnnnnnnnnnnnnnnnnnnnnnnnnnnnnnnnnnnnnnnnnnnnnnnnnnnnnnnnnnnnnnnnnnnnnnnnnnnnnnnnnnnnnnnnnnnnnnnnnnnnnnnnnnnnnnnnnnnnnnnnnnnnnnnnnnnnnnnnnnnnnnnnnnnnnnnnnnnnnnnnnnnnnnnnnnnnnnnnnnnnnnnnnnnnnnnnnnnnnnnnnnnnnnnnnnnnnnnnnnnnnnnnnnnnnnnnnnnnnnnnnnnnnnnnnnnnnnnnnnnnnnnnnnnnnnnnnnnnnnnnnnnnnnnnnnnnnnnnnnnnnnnnnnnnnnnnnnnnnnnnnnnnnnnnnnnnnnnnnnnnnnnnnnnnnnnnnnnnnnnnnnnnnnnnnnnnnnnnnnnnntatactattatgagactattagtaatgtggccgatgctcgccgaccgcggacttgcaccccaagttgccgatgcaacctcgcgccaatatggtcttttctccgacgtcgggacttcgacgcctcccgtgagtgtctgcctgtacgtgaactcacacataactccagttatggcgtgcaaacgttgagcacattgcaggtgactagaaggtgggtgacatttcggttttcacgcgactcgtaacggctcgagcctctgcgaccatcagtcacatcatgcgtcaactgcgcgcaatctcgcgctcttcttagcgatgtggcagtagccgtcttcgcctgactcccgggatacggcggcggccatcgccgttgaactcaagggtgtctcactgccgggtgaggcgtttgactcggacacgagtcacacaagcgcgatgtatccagaagggattgacaacgtggactatctgaaccgctatggctggaacagccaaggttcagcacaccggcgctcaattccctgcgatgtcgcaaagaaacaagcgccacgcacagtaccgacgcgtttgtagttcagggttgttccaggcctcccggcggccttccgctcagcggctagacagtgccgtcctcgtgcctttgagagtgcgcacggagtatctgcctttgatgcgccacacgtgatctgatgcgcctgccgaacaacagatagactgagccgtagaacaccagagccagaatgatgactgctgtcgtggtcaattgcccttacctccgtacgctcatggtagctcgtgtctcaagccggcgccaaaccgtggctgctgccacatggagctatagctggctgagcggaaatgagcgctactggcgaacagaagcgcgaatcggacagcgcgggcagatgtccgagccgccacccggatgcgggtgtcgtgcagcaacagtgtcgcagggccgtgcacgcatgagctgcaccgtgattcgctgtcatgaggcacgaatcgaactcgaacgcgggcgcagacccgatggttaacactcttctctgtggcgcatgacgccagtcacgtagtggctgggccgccgtcggtcagctcgagttgctgtcgcacggcctccctcagtgcgtgcaggcggtcctggctctcgcgacgcttcgcacgttcgaccgcagcgtcagtcttcttcgacttcttccctcgttttccgcgcccctggccggtctccgtgtcctcgtccagcccgtagtactccgtcaggctgactccaataagcagcgcggccgcatcgccgatagtcatgctgtggtagctcgcgaacaggaacagggccgcatgcgttcctatcggcaccttcacctgctttctcacacggtcaaagtgcagtcctgtgattcctggcgtcggtccctccccgacaaaatcgagaatgctgtccctgatgagcttcgctgccgcatcgccgaatgtcatgttgtgtgccgcggcgaacgcgtagagcatcttgtaggcagtctccggtatcttgatttgcttcacatcttcacgcggcctgccccttttcggccgcattatggttctgttctgcatcactgggtctcctcgcgttgatgtttccgtgcgttgacgcgcacttcaccacgatttcgtgtcacattgagtggcatttgttcgtaagtcgacgagttgtcgactctggcattgtagccaatcgcaacgtgaatgtcacatgaaacgcctggatgcacccgcgcggcggtctgcacacacaggaatggccatgagtacatcgatttcggcgcgtgaatgctgcgcaaccgcaccgaaagaactggtagtcgtgacgcagaccagtgaaatccctgtcccgcggtgtggccacggcccacagagggacgtgaaccgccgcagactggcacagaagtgttctactctaagcgaatactgagacagatacgcacgctggtcaccactgtgcacatctcagtgttgttctcgcggcgattagtgtccctactacggtgaacacgaacttccgaccgttggtgagagtcatctatgatgccgtgtgcgggacggactcctgtcgacaccctacagaaccggctgataatcgcatgcgatttcccgtcgcacgtttaacatggcctcgacagacctttcgcgcgtcgggtaccttagccctagccccaggtatccaagcagcgacaaagggtcagtcttcttagaggaagtgtcaggccgagttccaggaccgaaaggttgagggacaagtaaggcaggagtactccggaggctgagtcgaaatagaaactgtgaggacgcttggggctcttctttgtctccgcacgaccgacttccacgagcaccgccgccttgatcgcagtgcagaggttcagggggcggccgttgccatgcaagtacgtgtttgcagcaacgagactctaaacggcactagtatcaacggcgggtaagatcacgccgactcctgagcggaaccctcccttcatagcttgtccgcatctgtggggccacctcactggataccatccggtgtcagcgataatcgggcaatccgttagctgtccgttagctgtggccatgcctccagcaatcacatgaaacaccggggcgcgtcccggaacgcagaccgtgcaacagagcaaaccgagctacctgcccatggagtacaattaggatcgtggtcatgtttctagatagcttctggcggctcggaagagggcagcgggatgaagcgtggcgccgcgtttgccctctggccacgaagcactccgtcagtaacctgaacccggactatcccagttctttgacttgaactctatcgggcaggagatgattgagtgggcaggctgatattccatgaggatggtggagtgactctggatgagcctgaggccggcgccggatatatgccgtacgccgatctccgaaagtccaggcccagcaagtccgcagaatctgagccagttgactcagccgatgccaagccgcgcgtgggcaggcagtcgggcagggaagcacttcccgccgatcaagcgaatacggaagaagcttacgcgtgtcattggccgaggcgctgactgacatcgagtgaagtggctcccctccttctgtcccgttccagagaacaactccacgtagaaccccagtccgaatcactgagtcctcctcagttcagtgtggaaccctccccagagagaagagtctcgttcgccagtccatccggccccacgaccagttcccaagcaacaagttcaaggtcgcgaacagacggttcgcggctgggcggacgctggatgcggcggtcaatgcctggcagttttgagattgcgcagtgcatctagcagctggcccagcggagcattgggcttcaattgatttacgacccgcactgggtctcgcattgcgcgccgcttcaatacatctgagggaagcggctgtcgcatccgttgctccagccaatctcgcagttcggcgtccgccggcaacgccaatccctgcacgcaattgcgctcatgtgtacaggtctagcttacggagatacgacacgccacatggttgaattgtcttgggagtgtgtgcagaccacaatgcgagtctagctggcgctggtatcgctggcggagtgatgtcgttattaggactgcactcgagatcggtaaccgaattcgtagggagtcaaccgagcgctttctcgacaacgagaatccggaggcagttcgcaccgttgacaccgcgagccacttggtctagattggccccaacgccggcgttctcccccacggcgatgaggcgctcctggtatatgcctcaccattgcctcactgccgatccttgcaggcgcgaggaggcatatggacgattcttgcgcttcttcttgtggctgccggagttgtgacagacagttgtcacaacgcagtgtgaccgtagtgccgggagacccgctgttgttggtgacttggataacaaggccttgaacggtccgtggctcgcacggcgccggcacaatgcagactggccgggaggatccgtagcgtgaaatacaacttgcttcaagaaccatggattccggtgcttcgtatggatggctcccagactcatgtcggcatacgtgatgccctggcaagatcggggctgctcttgagtctcggcgagcccagtgcgacggacaatctggctctgcttcgattgctgattgccgtcactctgtggtgcaggtctgaacctggctcctcggagattgaagctctgcgggagtcgcgcggaatccctgaaggctggcttgcacgtctggatgaagactcgggcgcatttgaactctttggagatggcccacggttctatcaagacgggagggtgaagtccgaggtgccgggcagaccggcgtccgaccttctctcatacttcccggcggcaactgaaatcaaccacttcagacacatccacgacgacgatgtcgccatctgcccagcgtgttgtgccttggggctcatacgcctcccggtgcttgccattcagggcggcgctgggaagtcgccgtccatcaataatgcgcctcctgtctacttcatacggcgcggtagaacgctgttagacacactcatgttgaatatgcctcgtggcgggccggctgcggatgacagtcccgtgtggaagcccggcccaaggtcgagcagcgagatcggtacactcgaaggattcacgtggcaaccacgagctgtgtggttgggtccgacgagggcgacctcagatagtcggtgcagcaactgtggaagaagcggccccgtcgtatcaagcctggtattcgccaagggtcaggcaagaaaggatgacacacgctcatggagagacccgcacgttcactacacgaaggagcgcacgggcaacgataacgcagatccagacgcccgcgataacgttctgcgcgcatcgcatccgctcaagtacgcggccttggaggcgtccctctggaggaggacagcctcagcgattatgttgtccgtcgaaccacatgagtgcggcacgttgccagccggcgatagctacgacggaacaggaagcgacgcagtcgttgtcgagtgtattgcgccattcacatcccagggaaaggtcttcgatgagcaccggattgagtggcggataccacgcaaggttctccacgacgatgtcctgcgtcgctctgccttcgaggaactcgattggcttggccggttcaacttgaggaagctcctgggaagggcaagaggtgacggccgcatcaggaagcttgcggctaggtgcctagtcaatcccctcatctgcgagacagagcgccgactgttcggttcattcgtgactctgttgtggtcactggcgcaggagacttcgtcagagcagcgaggctcggtggaacgctggcgacgagaagtacttgacgtgctcgcctcgatgattcagcttgcccttacaacctgtgaccccggatcggctctgaaacgcaggcagatgcaacttcgggcggtggaagcgctccggcatgacgccgggatgactgtcacatcgcgtgggcgcgcttccgtcagacacgagcaagggcaattggagggagcgacaagatgaatccaaccgaggtctacgtgcggcgtcttctggctctaggggacggcgaacgagcagaactccgtcacaaacagggtgcctctctcagtgagtccctggagggatttgatttgttcaccggcctctggtggccattgcgacagcgcagtccggcagcaccgcagagagaaacaagttggctggcggcaaagctgatctgtcagtggccgattccgctcgcttcgtccgatgacagcgtgctacctcggttgctcggcagcgccgagcggcgactgtccgctcgctacgcacttcgtttcctgctgcggttcgataggctcttgcaatccccaatggctttgctggaaccgcagcttcaatgggcattgaaggtggtggcacaggcggtagttgccggttcagccaaagggttgaactgggtgcagcttcttgatgacctcgcggtatgggacggaagacccggcagggaatcaaagcacaatgtgcgcgacgcatgggctcgcgcctatctggcgtctagaaacagggagggaaagcgatgttagtcgagattcacatgattcagaaccacagtccgtcgaacctgaaccgagatgaccttggtgcccccaagagctgcacatttggtggcgtaactcgcgcgagaatttcaagccagtgtctgaagcgcagtatccgcaacccaggaaattctaacgacgtacacaacaaaggggcaagccttttcgtcgaagcgatgcgcgaacacacgggaatcaggacgaagtactttcctgaaatggtgcggcaggcgctgaacgactcaagcgtaccagacgaggaatgggacagagtcgtgcaggcttgcacgagtatcgccaagaaggaggtccagataggcgacgaggatgtacaggagcccggcgacagcgatgagcggcacaaactgccgcagctagtcctgttggagcgtactgaggcaaatgcgtttgttcatgtgttggaggcgatgcgtaccagtgacgagtggagcgccagctaccgccagtggatcgcaggcaaactgcagaagcggcctctcgcagctttcctgcgtgaactctcgcgcgcctattcgagacgatcagtggacatcgccatgttcggacgcatgactacttccgatgcgttcgaggacgtcgaagccgcaatgcaggtagctcacgccatatcaacccatcaggcggtttcggatgtggactacttcacggctgtggacgacctgggcgagttgggcggtggtgcaggccacgttgacgaggccatgttcaattccgcctgcttctacaagtacttcgctctagactgggaccaactcatcagtaacctcggtggctcttcctcttccgcactcgcagcgtccgcactgggccatttcattcgtgcggctgccatgacgacaccaaccggcaagcagaactcattcgcagcccacaaccttccagacgggattctcgtagaagtcaagcggaccggcaaaatccctgtcaactacgccaacgcgtttgtcgagcctgtcgcaatgaatgctccgcggggagtcgtgggtatgagcatcgctcaactgggccaatacgttcatcagattgcagagggttacggcattgactctcgtcgcttctggttctcaccgggggggcgctatcaattgacatggattgagcgctgtcagaaaggagagccgaccgagcgggaagttgttgcaggtgaagattcgcacgcgagattcgacgacttcgtgagtgtggttgtgcaagaggtttctggcctcgaatggaacagggtgaaggatccggacggtttcttgccggaggcgacatagtgactgcctcagacgaaagcatcgtactgctgaggctcgagggccctcttcaatcgtggggtgatggctcacgctttctgttgcggcgcaccatggatgccccaactaagtccggtgtcctcgggctcatctgctgcgcgctcggactgggaaggcgtgaggcatcccggcgcctgcatgaactggcactgctacgtatggctgtacggatcgaccgtcctgggtctcgccaatgggactatcacacagccggagctggatacggcatgctcacagcggagcgaaaggtcaagaagacgcagacgaccggggaatatgagaccttggtgtctcgccgtgagtatctctcggatgccagctttctagtcggcctgcagggtgagagtgcgcttattgaggaggtagcacaggcgctcgggtgtcccaggtggcccacttaccttgggcgcaagccatgcgcaccggcagtgccggtcgtcgcaacgagagtcacagtagtatcgcctggcgccgcggacaacgcccagagtctcctggaggcccttgagacacacccctggcgaccaagacttggcggggtagacttccctccaaacgataacgcgctaccgtgtctattggagtggcgaggcaccatccaaggacagcgacaccaggagcctcttgaagtctggtacgactcgccgctttccttctttccccccgcatatgcaccacggcttgtgatgagaaccaagctgcacgtgtcagtcgaagaacctctgcagcagtatctgtccgctcttccacggccgcgagcagactacaagaacagcgcctatcgcagggcgcgctccctcagattagccagtgactctggcctctgcatcttctgcaaggctcctgctaccaccgtgcagcacattacctatcggcgcgcaggcggcaacgagaccgtggatgatctccgttcgctctgtcgcctgtgccacgacgcagtaacgatgatcgagtacggactgggcatgggactggatcgcatcaatcctgaggacccgcagtggcgcgaggccatcattcagaagcggcaagaactcatccggttccggtcgctggagaccaggcggcgtcatctatctccagaggaggtggagtgaccatgtatctgtcggctcttctcgtcgacacaggcataaaccctgacagaccgcgcccgggccgactctggatgagacaaccctatcgtatccatcagaggttgtgcatgggattcccgctggcggaagcaaaggcaggcgatccggactttgtcagaccctatcgagtgggcgcctttagcggggtgcatcagaagatccggacaagcgagcaagcctttctattccgggtggaccctctggtgaacggcagggccatgattgttgtccagtcggcacgacggccggattgggagtacgccttccgtaatgcggactacctgctggctgggccacccgaagtgaaggaggtccaccatgactatcaagaaggccagtcgctgctcttccgcctgcgtgccaaccccactagacggaacaacgagacccgaaagcgggagggcgtcctaacggaggaaaagcagcgcgaatggctggttcggaaaggacagtctggtggatttgaagtactgtccacgacagtgaccgacgagagcttcaagagggcgacccggaaacacctcgaagagaacgaggactccgaatgcatgtcgcatctttcggtccgctacgacggcatcctgcgagtgacaggccctgaagccttacgcgaggctatcatcggcggcatcggcagcgccaaggcttttggattcggactgttgtccgtagcacctgacagaggatagcggatgcgcacgctcttcgaccttccacggttccaggatcgctggagctacgtgtacctcgagacggggcgactcgatgtagatgatctcggcctgtgcttccgccaggacacccgaacaacgcgagtgcccatcgaccagctctcggtgttgatgctcggacccggcactacggtgacacacgctgcggtagcggcgctctcgcggaacaactgtctcctggcgtggacagggcaggatggcacgcgactgtatgccgccagtacaggtggaacacacagcgccaaaaggctcatcaggcaggcgtcgctggtgagcgacgatgaatcccgcctgcatattgcctggcgcatgtaccgtttcagattcgcggaatccgtaccagacgtcgtgagtctggagagcataagagggatggagggcctacgtgtgcgcaaagcatacgccgacgccgcccgcgcatatggcatcgactggaagggcaggcgatacaaccagggcaactgggaagctgcggacccggtcaatcgtgcgctatctgctgcaaacgcctgcttgtacggtgtgtgtcacgccgcgatcctctcggccggatactctccgggactcggtttcatccacacgggcaagatgctcagcttcgtctacgacatagcagacctgtacaagacaactctcacgattccgctggcctttcaaaccgcggccgagatgcccgagagtatcgaacgcggcacgcgaatgcgttgccgtacggcgttccacgaattcagactcatggagagacttctgccagatatcgcggaggtgcttggtgttggtaatgatgctggggagagtgccgacgaacttgaggggcgcattgtcgcgatggctcctggagccggcgactggaacctttcttgggaacccgagtgggcgagtgagggacgagttgtggatgaaggccgtcaagacaacgaaggagaccgggtgggtgctgcagatatggtcagacaggaatccacaggggttctcctatcgtcagcacggcatccaaacgaggcaactggtggacttcgagggtctggcgctggtgacagtctctcctcaaccgcggactgttcaggatagcgacactgaaacccgttgatgacgagtggccaccatgcattccagtcgtggcaagtcagggtgttccccacgcaggtgggggtgaaccgtgggtaagctagggactgtactaggcggcttcgtgttccccacgcaggtgggggtgaaccgagaccgaggcgcagtcgtacaacgtcgaggacgtgttccccacgcaggtgggggtgaaccgcaggacgagtatcgctcccgaggcaggctcccgtgttccccacgcaggtgggggtgaaccgggcatcttcactggcgtagcggctgacgactacgtgttccccacgcaggtgggggtgaaccgtacgagtacacctgtgacaactgcggtgtgaaagtgttccccacgcaggtgggggtgaaccggttgagaagctcgaccagatgaaccgcgaactcgtgttccccacgcaggtgggggtgaaccggacctgtgcaagaagacaaaggtcggcacggagtgttccccacgcaggtgggggtgaaccgctggtaggcaagggtacgctcaccaacttcacgtgttccccacgcaggtgggggtgaaccgatgatggcctctcgccggaagccgattcacctgtgttccccacgcaggtgggggtnnnnnnnnnnnnnnnnnnnnnnnnnnnnnnnnnnnnnnnnnnnnnnnnnnnnnnnnncccacgcaggtgggggtgaaccgagatgctgacgctggctgcggtcgctgcggctgtgttccccacgcaggtgggggtgaaccggccaaggttatcaagctcatggacgccgacgcggtgttccccacgcaggtgggggtgaaccgtaaacggggcgggcgggagtaacccgccccgagtgttccccacgcaggtgggggtgaaccgcaggctcacatcgagagcgcttgagtacatgagtgttccccacgcaggtgggggtgaaccgtacctcaacgggtcgtacatgtcagggttggcgtgttccccacgcaggtgggggtgaaccgccacttcggagaggtgttgtacggcagcaggtgtgttccccacgcaggtgggggtgaaccgtggctctacgccatcaccggcaccgcatcagacgtgttccccacgcaggtgggggtgaaccgaccctgtaccagaacaccaacacgcaggcatcgtgttccccacgcaggtgggggtgaaccgcaggctcacatcgagagcgcttgagtacatgagtgttccccacgcaggtgggggtgaaccgcaatggctggccacgggccaaaaaggagggaaagtgttccccacgcaggtgggggtgaaccttagaactgacaagtgccaatgagcgggctgttgtgttccccacgcaggtgggggtgaaccgaaggatgagacgtccgtcacgtatgacatcgggtgttccccacgcaggtgggtgtgaaccgatgatggcctctcgccggaagccgattcacctgtgttccccacgcaggtgggggtgaaccggaagccgcatagcgagtggcatacgcatgtctgtgttccccacgcaggtgggggtgaaccgcacaaacaggctgtacgtttcagtcgcgtacttgtgttccccacgcaggtgggggtgaaccgtacgcggcctccggcgaccacatctcgccgtggtgttccccacgcaggtgggggtgaaccgtcatggacagaatggagcgcgcagcagaaggcgtgttccccacgcaggtgggggtgaaccgctagcaggtgaagccgcgactgcgagtctggcgtgttccccacgcaggtgggggtgaaccgacgctctcgttcctggtggttgcgctgattgcgtgttccccacgtatgtgtgggtgaacctctaatgcatcggcattttcgcgccttggtgatgtgttcaccacgtattctggggggaaccgactgtaagtgagtggcagggtgcgtcggaaccgctgcaagcggtgtgatgatctaccagccacccaccaccggagctctgtcatgccgaaggcacctcaatcgcggtgaaaagccccagcacgacacgcataactggagttactaatagtctcataatagtata

SEQ ID NO: 1017 - DNA, 105444 bp, Artificial Sequence
  Synthetic Oligonucleotide
  misc_feature (1)..(93270): n is a, c, g, or t
nnnnnnnnnnnnnnnnnnnnnnnnnnnnnnnnnnnnnnnnnnnnnnnnnnnnnnnnnnnnnnnnnnnnnnnnnnnnnnnnnnnnnnnnnnnnnnnnnnnnnnnnnnnnnnnnnnnnnnnnnnnnnnnnnnnnnnnnnnnnnnnnnnnnnnnnnnnnnnnnnnnnnnnnnnnnnnnnnnnnnnnnnnnnnnnnnnnnnnnnnnnnnnnnnnnnnnnnnnnnnnnnnnnnnnnnnnnnnnnnnnnnnnnnnnnnnnnnnnnnnnnnnnnnnnnnnnnnnnnnnnnnnnnnnnnnnnnnnnnnnnnnnnnnnnnnnnnnnnnnnnnnnnnnnnnnnnnnnnnnnnnnnnnnnnnnnnnnnnnnnnnnnnnnnnnnnnnnnnnnnnnnnnnnnnnnnnnnnnnnnnnnnnnnnnnnnnnnnnnnnnnnnnnnnnnnnnnnnnnnnnnnnnnnnnnnnnnnnnnnnnnnnnnnnnnnnnnnnnnnnnnnnnnnnnnnnnnnnnnnnnnnnnnnnnnnnnnnnnnnnnnnnnnnnnnnnnnnnnnnnnnnnnnnnnnnnnnnnnnnnnnnnnnnnnnnnnnnnnnnnnnnnnnnnnnnnnnnnnnnnnnnnnnnnnnnnnnnnnnnnnnnnnnnnnnnnnnnnnnnnnnnnnnnnnnnnnnnnnnnnnnnnnnnnnnnnnnnnnnnnnnnnnnnnnnnnnnnnnnnnnnnnnnnnnnnnnnnnnnnnnnnnnnnnnnnnnnnnnnnnnnnnnnnnnnnnnnnnnnnnnnnnnnnnnnnnnnnnnnnnnnnnnnnnnnnnnnnnnnnnnnnnnnnnnnnnnnnnnnnnnnnnnnnnnnnnnnnnnnnnnnnnnnnnnnnnnnnnnnnnnnnnnnnnnnnnnnnnnnnnnnnnnnnnnnnnnnnnnnnnnnnnnnnnnnnnnnnnnnnnnnnnnnnnnnnnnnnnnnnnnnnnnnnnnnnnnnnnnnnnnnnnnnnnnnnnnnnnnnnnnnnnnnnnnnnnnnnnnnnnnnnnnnnnnnnnnnnnnnnnnnnnnnnnnnnnnnnnnnnnnnnnnnnnnnnnnnnnnnnnnnnnnnnnnnnnnnnnnnnnnnnnnnnnnnnnnnnnnnnnnnnnnnnnnnnnnnnnnnnnnnnnnnnnnnnnnnnnnnnnnnnnnnnnnnnnnnnnnnnnnnnnnnnnnnnnnnnnnnnnnnnnnnnnnnnnnnnnnnnnnnnnnnnnnnnnnnnnnnnnnnnnnnnnnnnnnnnnnnnnnnnnnnnnnnnnnnnnnnnnnnnnnnnnnnnnnnnnnnnnnnnnnnnnnnnnnnnnnnnnnnnnnnnnnnnnnnnnnnnnnnnnnnnnnnnnnnnnnnnnnnnnnnnnnnnnnnnnnnnnnnnnnnnnnnnnnnnnnnnnnnnnnnnnnnnnnnnnnnnnnnnnnnnnnnnnnnnnnnnnnnnnnnnnnnnnnnnnnnnnnnnnnnnnnnnnnnnnnnnnnnnnnnnnnnnnnnnnnnnnnnnnnnnnnnnnnnnnnnnnnnnnnnnnnnnnnnnnnnnnnnnnnnnnnnnnnnnnnnnnnnnnnnnnnnnnnnnnnnnnnnnnnnnnnnnnnnnnnnnnnnnnnnnnnnnnnnnnnnnnnnnnnnnnnnnnnnnnnnnnnnnnnnnnnnnnnnnnnnnnnnnnnnnnnnnnnnnnnnnnnnnnnnnnnnnnnnnnnnnnnnnnnnnnnnnnnnnnnnnnnnnnnnnnnnnnnnnnnnnnnnnnnnnnnnnnnnnnnnnnnnnnnnnnnnnnnnnnnnnnnnnnnnnnnnnnnnnnnnnnnnnnnnnnnnnnnnnnnnnnnnnnnnnnnnnnnnnnnnnnnnnnnnnnnnnnnnnnnnnnnnnnnnnnnnnnnnnnnnnnnnnnnnnnnnnnnnnnnnnnnnnnnnnnnnnnnnnnnnnnnnnnnnnnnnnnnnnnnnnnnnnnnnnnnnnnnnnnnnnnnnnnnnnnnnnnnnnnnnnnnnnnnnnnnnnnnnnnnnnnnnnnnnnnnnnnnnnnnnnnnnnnnnnnnnnnnnnnnnnnnnnnnnnnnnnnnnnnnnnnnnnnnnnnnnnnnnnnnnnnnnnnnnnnnnnnnnnnnnnnnnnnnnnnnnnnnnnnnnnnnnnnnnnnnnnnnnnnnnnnnnnnnnnnnnnnnnnnnnnnnnnnnnnnnnnnnnnnnnnnnnnnnnnnnnnnnnnnnnnnnnnnnnnnnnnnnnnnnnnnnnnnnnnnnnnnnnnnnnnnnnnnnnnnnnnnnnnnnnnnnnnnnnnnnnnnnnnnnnnnnnnnnnnnnnnnnnnnnnnnnnnnnnnnnnnnnnnnnnnnnnnnnnnnnnnnnnnnnnnnnnnnnnnnnnnnnnnnnnnnnnnnnnnnnnnnnnnnnnnnnnnnnnnnnnnnnnnnnnnnnnnnnnnnnnnnnnnnnnnnnnnnnnnnnnnnnnnnnnnnnnnnnnnnnnnnnnnnnnnnnnnnnnnnnnnnnnnnnnnnnnnnnnnnnnnnnnnnnnnnnnnnnnnnnnnnnnnnnnnnnnnnnnnnnnnnnnnnnnnnnnnnnnnnnnnnnnnnnnnnnnnnnnnnnnnnnnnnnnnnnnnnnnnnnnnnnnnnnnnnnnnnnnnnnnnnnnnnnnnnnnnnnnnnnnnnnnnnnnnnnnnnnnnnnnnnnnnnnnnnnnnnnnnnnnnnnnnnnnnnnnnnnnnnnnnnnnnnnnnnnnnnnnnnnnnnnnnnnnnnnnnnnnnnnnnnnnnnnnnnnnnnnnnnnnnnnnnnnnnnnnnnnnnnnnnnnnnnnnnnnnnnnnnnnnnnnnnnnnnnnnnnnnnnnnnnnnnnnnnnnnnnnnnnnnnnnnnnnnnnnnnnnnnnnnnnnnnnnnnnnnnnnnnnnnnnnnnnnnnnnnnnnnnnnnnnnnnnnnnnnnnnnnnnnnnnnnnnnnnnnnnnnnnnnnnnnnnnnnnnnnnnnnnnnnnnnnnnnnnnnnnnnnnnnnnnnnnnnnnnnnnnnnnnnnnnnnnnnnnnnnnnnnnnnnnnnnnnnnnnnnnnnnnnnnnnnnnnnnnnnnnnnnnnnnnnnnnnnnnnnnnnnnnnnnnnnnnnnnnnnnnnnnnnnnnnnnnnnnnnnnnnnnnnnnnnnnnnnnnnnnnnnnnnnnnnnnnnnnnnnnnnnnnnnnnnnnnnnnnnnnnnnnnnnnnnnnnnnnnnnnnnnnnnnnnnnnnnnnnnnnnnnnnnnnnnnnnnnnnnnnnnnnnnnnnnnnnnnnnnnnnnnnnnnnnnnnnnnnnnnnnnnnnnnnnnnnnnnnnnnnnnnnnnnnnnnnnnnnnnnnnnnnnnnnnnnnnnnnnnnnnnnnnnnnnnnnnnnnnnnnnnnnnnnnnnnnnnnnnnnnnnnnnnnnnnnnnnnnnnnnnnnnnnnnnnnnnnnnnnnnnnnnnnnnnnnnnnnnnnnnnnnnnnnnnnnnnnnnnnnnnnnnnnnnnnnnnnnnnnnnnnnnnnnnnnnnnnnnnnnnnnnnnnnnnnnnnnnnnnnnnnnnnnnnnnnnnnnnnnnnnnnnnnnnnnnnnnnnnnnnnnnnnnnnnnnnnnnnnnnnnnnnnnnnnnnnnnnnnnnnnnnnnnnnnnnnnnnnnnnnnnnnnnnnnnnnnnnnnnnnnnnnnnnnnnnnnnnnnnnnnnnnnnnnnnnnnnnnnnnnnnnnnnnnnnnnnnnnnnnnnnnnnnnnnnnnnnnnnnnnnnnnnnnnnnnnnnnnnnnnnnnnnnnnnnnnnnnnnnnnnnnnnnnnnnnnnnnnnnnnnnnnnnnnnnnnnnnnnnnnnnnnnnnnnnnnnnnnnnnnnnnnnnnnnnnnnnnnnnnnnnnnnnnnnnnnnnnnnnnnnnnnnnnnnnnnnnnnnnnnnnnnnnnnnnnnnnnnnnnnnnnnnnnnnnnnnnnnnnnnnnnnnnnnnnnnnnnnnnnnnnnnnnnnnnnnnnnnnnnnnnnnnnnnnnnnnnnnnnnnnnnnnnnnnnnnnnnnnnnnnnnnnnnnnnnnnnnnnnnnnnnnnnnnnnnnnnnnnnnnnnnnnnnnnnnnnnnnnnnnnnnnnnnnnnnnnnnnnnnnnnnnnnnnnnnnnnnnnnnnnnnnnnnnnnnnnnnnnnnnnnnnnnnnnnnnnnnnnnnnnnnnnnnnnnnnnnnnnnnnnnnnnnnnnnnnnnnnnnnnnnnnnnnnnnnnnnnnnnnnnnnnnnnnnnnnnnnnnnnnnnnnnnnnnnnnnnnnnnnnnnnnnnnnnnnnnnnnnnnnnnnnnnnnnnnnnnnnnnnnnnnnnnnnnnnnnnnnnnnnnnnnnnnnnnnnnnnnnnnnnnnnnnnnnnnnnnnnnnnnnnnnnnnnnnnnnnnnnnnnnnnnnnnnnnnnnnnnnnnnnnnnnnnnnnnnnnnnnnnnnnnnnnnnnnnnnnnnnnnnnnnnnnnnnnnnnnnnnnnnnnnnnnnnnnnnnnnnnnnnnnnnnnnnnnnnnnnnnnnnnnnnnnnnnnnnnnnnnnnnnnnnnnnnnnnnnnnnnnnnnnnnnnnnnnnnnnnnnnnnnnnnnnnnnnnnnnnnnnnnnnnnnnnnnnnnnnnnnnnnnnnnnnnnnnnnnnnnnnnnnnnnnnnnnnnnnnnnnnnnnnnnnnnnnnnnnnnnnnnnnnnnnnnnnnnnnnnnnnnnnnnnnnnnnnnnnnnnnnnnnnnnnnnnnnnnnnnnnnnnnnnnnnnnnnnnnnnnnnnnnnnnnnnnnnnnnnnnnnnnnnnnnnnnnnnnnnnnnnnnnnnnnnnnnnnnnnnnnnnnnnnnnnnnnnnnnnnnnnnnnnnnnnnnnnnnnnnnnnnnnnnnnnnnnnnnnnnnnnnnnnnnnnnnnnnnnnnnnnnnnnnnnnnnnnnnnnnnnnnnnnnnnnnnnnnnnnnnnnnnnnnnnnnnnnnnnnnnnnnnnnnnnnnnnnnnnnnnnnnnnnnnnnnnnnnnnnnnnnnnnnnnnnnnnnnnnnnnnnnnnnnnnnnnnnnnnnnnnnnnnnnnnnnnnnnnnnnnnnnnnnnnnnnnnnnnnnnnnnnnnnnnnnnnnnnnnnnnnnnnnnnnnnnnnnnnnnnnnnnnnnnnnnnnnnnnnnnnnnnnnnnnnnnnnnnnnnnnnnnnnnnnnnnnnnnnnnnnnnnnnnnnnnnnnnnnnnnnnnnnnnnnnnnnnnnnnnnnnnnnnnnnnnnnnnnnnnnnnnnnnnnnnnnnnnnnnnnnnnnnnnnnnnnnnnnnnnnnnnnnnnnnnnnnnnnnnnnnnnnnnnnnnnnnnnnnnnnnnnnnnnnnnnnnnnnnnnnnnnnnnnnnnnnnnnnnnnnnnnnnnnnnnnnnnnnnnnnnnnnnnnnnnnnnnnnnnnnnnnnnnnnnnnnnnnnnnnnnnnnnnnnnnnnnnnnnnnnnnnnnnnnnnnnnnnnnnnnnnnnnnnnnnnnnnnnnnnnnnnnnnnnnnnnnnnnnnnnnnnnnnnnnnnnnnnnnnnnnnnnnnnnnnnnnnnnnnnnnnnnnnnnnnnnnnnnnnnnnnnnnnnnnnnnnnnnnnnnnnnnnnnnnnnnnnnnnnnnnnnnnnnnnnnnnnnnnnnnnnnnnnnnnnnnnnnnnnnnnnnnnnnnnnnnnnnnnnnnnnnnnnnnnnnnnnnnnnnnnnnnnnnnnnnnnnnnnnnnnnnnnnnnnnnnnnnnnnnnnnnnnnnnnnnnnnnnnnnnnnnnnnnnnnnnnnnnnnnnnnnnnnnnnnnnnnnnnnnnnnnnnnnnnnnnnnnnnnnnnnnnnnnnnnnnnnnnnnnnnnnnnnnnnnnnnnnnnnnnnnnnnnnnnnnnnnnnnnnnnnnnnnnnnnnnnnnnnnnnnnnnnnnnnnnnnnnnnnnnnnnnnnnnnnnnnnnnnnnnnnnnnnnnnnnnnnnnnnnnnnnnnnnnnnnnnnnnnnnnnnnnnnnnnnnnnnnnnnnnnnnnnnnnnnnnnnnnnnnnnnnnnnnnnnnnnnnnnnnnnnnnnnnnnnnnnnnnnnnnnnnnnnnnnnnnnnnnnnnnnnnnnnnnnnnnnnnnnnnnnnnnnnnnnnnnnnnnnnnnnnnnnnnnnnnnnnnnnnnnnnnnnnnnnnnnnnnnnnnnnnnnnnnnnnnnnnnnnnnnnnnnnnnnnnnnnnnnnnnnnnnnnnnnnnnnnnnnnnnnnnnnnnnnnnnnnnnnnnnnnnnnnnnnnnnnnnnnnnnnnnnnnnnnnnnnnnnnnnnnnnnnnnnnnnnnnnnnnnnnnnnnnnnnnnnnnnnnnnnnnnnnnnnnnnnnnnnnnnnnnnnnnnnnnnnnnnnnnnnnnnnnnnnnnnnnnnnnnnnnnnnnnnnnnnnnnnnnnnnnnnnnnnnnnnnnnnnnnnnnnnnnnnnnnnnnnnnnnnnnnnnnnnnnnnnnnnnnnnnnnnnnnnnnnnnnnnnnnnnnnnnnnnnnnnnnnnnnnnnnnnnnnnnnnnnnnnnnnnnnnnnnnnnnnnnnnnnnnnnnnnnnnnnnnnnnnnnnnnnnnnnnnnnnnnnnnnnnnnnnnnnnnnnnnnnnnnnnnnnnnnnnnnnnnnnnnnnnnnnnnnnnnnnnnnnnnnnnnnnnnnnnnnnnnnnnnnnnnnnnnnnnnnnnnnnnnnnnnnnnnnnnnnnnnnnnnnnnnnnnnnnnnnnnnnnnnnnnnnnnnnnnnnnnnnnnnnnnnnnnnnnnnnnnnnnnnnnnnnnnnnnnnnnnnnnnnnnnnnnnnnnnnnnnnnnnnnnnnnnnnnnnnnnnnnnnnnnnnnnnnnnnnnnnnnnnnnnnnnnnnnnnnnnnnnnnnnnnnnnnnnnnnnnnnnnnnnnnnnnnnnnnnnnnnnnnnnnnnnnnnnnnnnnnnnnnnnnnnnnnnnnnnnnnnnnnnnnnnnnnnnnnnnnnnnnnnnnnnnnnnnnnnnnnnnnnnnnnnnnnnnnnnnnnnnnnnnnnnnnnnnnnnnnnnnnnnnnnnnnnnnnnnnnnnnnnnnnnnnnnnnnnnnnnnnnnnnnnnnnnnnnnnnnnnnnnnnnnnnnnnnnnnnnnnnnnnnnnnnnnnnnnnnnnnnnnnnnnnnnnnnnnnnnnnnnnnnnnnnnnnnnnnnnnnnnnnnnnnnnnnnnnnnnnnnnnnnnnnnnnnnnnnnnnnnnnnnnnnnnnnnnnnnnnnnnnnnnnnnnnnnnnnnnnnnnnnnnnnnnnnnnnnnnnnnnnnnnnnnnnnnnnnnnnnnnnnnnnnnnnnnnnnnnnnnnnnnnnnnnnnnnnnnnnnnnnnnnnnnnnnnnnnnnnnnnnnnnnnnnnnnnnnnnnnnnnnnnnnnnnnnnnnnnnnnnnnnnnnnnnnnnnnnnnnnnnnnnnnnnnnnnnnnnnnnnnnnnnnnnnnnnnnnnnnnnnnnnnnnnnnnnnnnnnnnnnnnnnnnnnnnnnnnnnnnnnnnnnnnnnnnnnnnnnnnnnnnnnnnnnnnnnnnnnnnnnnnnnnnnnnnnnnnnnnnnnnnnnnnnnnnnnnnnnnnnnnnnnnnnnnnnnnnnnnnnnnnnnnnnnnnnnnnnnnnnnnnnnnnnnnnnnnnnnnnnnnnnnnnnnnnnnnnnnnnnnnnnnnnnnnnnnnnnnnnnnnnnnnnnnnnnnnnnnnnnnnnnnnnnnnnnnnnnnnnnnnnnnnnnnnnnnnnnnnnnnnnnnnnnnnnnnnnnnnnnnnnnnnnnnnnnnnnnnnnnnnnnnnnnnnnnnnnnnnnnnnnnnnnnnnnnnnnnnnnnnnnnnnnnnnnnnnnnnnnnnnnnnnnnnnnnnnnnnnnnnnnnnnnnnnnnnnnnnnnnnnnnnnnnnnnnnnnnnnnnnnnnnnnnnnnnnnnnnnnnnnnnnnnnnnnnnnnnnnnnnnnnnnnnnnnnnnnnnnnnnnnnnnnnnnnnnnnnnnnnnnnnnnnnnnnnnnnnnnnnnnnnnnnnnnnnnnnnnnnnnnnnnnnnnnnnnnnnnnnnnnnnnnnnnnnnnnnnnnnnnnnnnnnnnnnnnnnnnnnnnnnnnnnnnnnnnnnnnnnnnnnnnnnnnnnnnnnnnnnnnnnnnnnnnnnnnnnnnnnnnnnnnnnnnnnnnnnnnnnnnnnnnnnnnnnnnnnnnnnnnnnnnnnnnnnnnnnnnnnnnnnnnnnnnnnnnnnnnnnnnnnnnnnnnnnnnnnnnnnnnnnnnnnnnnnnnnnnnnnnnnnnnnnnnnnnnnnnnnnnnnnnnnnnnnnnnnnnnnnnnnnnnnnnnnnnnnnnnnnnnnnnnnnnnnnnnnnnnnnnnnnnnnnnnnnnnnnnnnnnnnnnnnnnnnnnnnnnnnnnnnnnnnnnnnnnnnnnnnnnnnnnnnnnnnnnnnnnnnnnnnnnnnnnnnnnnnnnnnnnnnnnnnnnnnnnnnnnnnnnnnnnnnnnnnnnnnnnnnnnnnnnnnnnnnnnnnnnnnnnnnnnnnnnnnnnnnnnnnnnnnnnnnnnnnnnnnnnnnnnnnnnnnnnnnnnnnnnnnnnnnnnnnnnnnnnnnnnnnnnnnnnnnnnnnnnnnnnnnnnnnnnnnnnnnnnnnnnnnnnnnnnnnnnnnnnnnnnnnnnnnnnnnnnnnnnnnnnnnnnnnnnnnnnnnnnnnnnnnnnnnnnnnnnnnnnnnnnnnnnnnnnnnnnnnnnnnnnnnnnnnnnnnnnnnnnnnnnnnnnnnnnnnnnnnnnnnnnnnnnnnnnnnnnnnnnnnnnnnnnnnnnnnnnnnnnnnnnnnnnnnnnnnnnnnnnnnnnnnnnnnnnnnnnnnnnnnnnnnnnnnnnnnnnnnnnnnnnnnnnnnnnnnnnnnnnnnnnnnnnnnnnnnnnnnnnnnnnnnnnnnnnnnnnnnnnnnnnnnnnnnnnnnnnnnnnnnnnnnnnnnnnnnnnnnnnnnnnnnnnnnnnnnnnnnnnnnnnnnnnnnnnnnnnnnnnnnnnnnnnnnnnnnnnnnnnnnnnnnnnnnnnnnnnnnnnnnnnnnnnnnnnnnnnnnnnnnnnnnnnnnnnnnnnnnnnnnnnnnnnnnnnnnnnnnnnnnnnnnnnnnnnnnnnnnnnnnnnnnnnnnnnnnnnnnnnnnnnnnnnnnnnnnnnnnnnnnnnnnnnnnnnnnnnnnnnnnnnnnnnnnnnnnnnnnnnnnnnnnnnnnnnnnnnnnnnnnnnnnnnnnnnnnnnnnnnnnnnnnnnnnnnnnnnnnnnnnnnnnnnnnnnnnnnnnnnnnnnnnnnnnnnnnnnnnnnnnnnnnnnnnnnnnnnnnnnnnnnnnnnnnnnnnnnnnnnnnnnnnnnnnnnnnnnnnnnnnnnnnnnnnnnnnnnnnnnnnnnnnnnnnnnnnnnnnnnnnnnnnnnnnnnnnnnnnnnnnnnnnnnnnnnnnnnnnnnnnnnnnnnnnnnnnnnnnnnnnnnnnnnnnnnnnnnnnnnnnnnnnnnnnnnnnnnnnnnnnnnnnnnnnnnnnnnnnnnnnnnnnnnnnnnnnnnnnnnnnnnnnnnnnnnnnnnnnnnnnnnnnnnnnnnnnnnnnnnnnnnnnnnnnnnnnnnnnnnnnnnnnnnnnnnnnnnnnnnnnnnnnnnnnnnnnnnnnnnnnnnnnnnnnnnnnnnnnnnnnnnnnnnnnnnnnnnnnnnnnnnnnnnnnnnnnnnnnnnnnnnnnnnnnnnnnnnnnnnnnnnnnnnnnnnnnnnnnnnnnnnnnnnnnnnnnnnnnnnnnnnnnnnnnnnnnnnnnnnnnnnnnnnnnnnnnnnnnnnnnnnnnnnnnnnnnnnnnnnnnnnnnnnnnnnnnnnnnnnnnnnnnnnnnnnnnnnnnnnnnnnnnnnnnnnnnnnnnnnnnnnnnnnnnnnnnnnnnnnnnnnnnnnnnnnnnnnnnnnnnnnnnnnnnnnnnnnnnnnnnnnnnnnnnnnnnnnnnnnnnnnnnnnnnnnnnnnnnnnnnnnnnnnnnnnnnnnnnnnnnnnnnnnnnnnnnnnnnnnnnnnnnnnnnnnnnnnnnnnnnnnnnnnnnnnnnnnnnnnnnnnnnnnnnnnnnnnnnnnnnnnnnnnnnnnnnnnnnnnnnnnnnnnnnnnnnnnnnnnnnnnnnnnnnnnnnnnnnnnnnnnnnnnnnnnnnnnnnnnnnnnnnnnnnnnnnnnnnnnnnnnnnnnnnnnnnnnnnnnnnnnnnnnnnnnnnnnnnnnnnnnnnnnnnnnnnnnnnnnnnnnnnnnnnnnnnnnnnnnnnnnnnnnnnnnnnnnnnnnnnnnnnnnnnnnnnnnnnnnnnnnnnnnnnnnnnnnnnnnnnnnnnnnnnnnnnnnnnnnnnnnnnnnnnnnnnnnnnnnnnnnnnnnnnnnnnnnnnnnnnnnnnnnnnnnnnnnnnnnnnnnnnnnnnnnnnnnnnnnnnnnnnnnnnnnnnnnnnnnnnnnnnnnnnnnnnnnnnnnnnnnnnnnnnnnnnnnnnnnnnnnnnnnnnnnnnnnnnnnnnnnnnnnnnnnnnnnnnnnnnnnnnnnnnnnnnnnnnnnnnnnnnnnnnnnnnnnnnnnnnnnnnnnnnnnnnnnnnnnnnnnnnnnnnnnnnnnnnnnnnnnnnnnnnnnnnnnnnnnnnnnnnnnnnnnnnnnnnnnnnnnnnnnnnnnnnnnnnnnnnnnnnnnnnnnnnnnnnnnnnnnnnnnnnnnnnnnnnnnnnnnnnnnnnnnnnnnnnnnnnnnnnnnnnnnnnnnnnnnnnnnnnnnnnnnnnnnnnnnnnnnnnnnnnnnnnnnnnnnnnnnnnnnnnnnnnnnnnnnnnnnnnnnnnnnnnnnnnnnnnnnnnnnnnnnnnnnnnnnnnnnnnnnnnnnnnnnnnnnnnnnnnnnnnnnnnnnnnnnnnnnnnnnnnnnnnnnnnnnnnnnnnnnnnnnnnnnnnnnnnnnnnnnnnnnnnnnnnnnnnnnnnnnnnnnnnnnnnnnnnnnnnnnnnnnnnnnnnnnnnnnnnnnnnnnnnnnnnnnnnnnnnnnnnnnnnnnnnnnnnnnnnnnnnnnnnnnnnnnnnnnnnnnnnnnnnnnnnnnnnnnnnnnnnnnnnnnnnnnnnnnnnnnnnnnnnnnnnnnnnnnnnnnnnnnnnnnnnnnnnnnnnnnnnnnnnnnnnnnnnnnnnnnnnnnnnnnnnnnnnnnnnnnnnnnnnnnnnnnnnnnnnnnnnnnnnnnnnnnnnnnnnnnnnnnnnnnnnnnnnnnnnnnnnnnnnnnnnnnnnnnnnnnnnnnnnnnnnnnnnnnnnnnnnnnnnnnnnnnnnnnnnnnnnnnnnnnnnnnnnnnnnnnnnnnnnnnnnnnnnnnnnnnnnnnnnnnnnnnnnnnnnnnnnnnnnnnnnnnnnnnnnnnnnnnnnnnnnnnnnnnnnnnnnnnnnnnnnnnnnnnnnnnnnnnnnnnnnnnnnnnnnnnnnnnnnnnnnnnnnnnnnnnnnnnnnnnnnnnnnnnnnnnnnnnnnnnnnnnnnnnnnnnnnnnnnnnnnnnnnnnnnnnnnnnnnnnnnnnnnnnnnnnnnnnnnnnnnnnnnnnnnnnnnnnnnnnnnnnnnnnnnnnnnnnnnnnnnnnnnnnnnnnnnnnnnnnnnnnnnnnnnnnnnnnnnnnnnnnnnnnnnnnnnnnnnnnnnnnnnnnnnnnnnnnnnnnnnnnnnnnnnnnnnnnnnnnnnnnnnnnnnnnnnnnnnnnnnnnnnnnnnnnnnnnnnnnnnnnnnnnnnnnnnnnnnnnnnnnnnnnnnnnnnnnnnnnnnnnnnnnnnnnnnnnnnnnnnnnnnnnnnnnnnnnnnnnnnnnnnnnnnnnnnnnnnnnnnnnnnnnnnnnnnnnnnnnnnnnnnnnnnnnnnnnnnnnnnnnnnnnnnnnnnnnnnnnnnnnnnnnnnnnnnnnnnnnnnnnnnnnnnnnnnnnnnnnnnnnnnnnnnnnnnnnnnnnnnnnnnnnnnnnnnnnnnnnnnnnnnnnnnnnnnnnnnnnnnnnnnnnnnnnnnnnnnnnnnnnnnnnnnnnnnnnnnnnnnnnnnnnnnnnnnnnnnnnnnnnnnnnnnnnnnnnnnnnnnnnnnnnnnnnnnnnnnnnnnnnnnnnnnnnnnnnnnnnnnnnnnnnnnnnnnnnnnnnnnnnnnnnnnnnnnnnnnnnnnnnnnnnnnnnnnnnnnnnnnnnnnnnnnnnnnnnnnnnnnnnnnnnnnnnnnnnnnnnnnnnnnnnnnnnnnnnnnnnnnnnnnnnnnnnnnnnnnnnnnnnnnnnnnnnnnnnnnnnnnnnnnnnnnnnnnnnnnnnnnnnnnnnnnnnnnnnnnnnnnnnnnnnnnnnnnnnnnnnnnnnnnnnnnnnnnnnnnnnnnnnnnnnnnnnnnnnnnnnnnnnnnnnnnnnnnnnnnnnnnnnnnnnnnnnnnnnnnnnnnnnnnnnnnnnnnnnnnnnnnnnnnnnnnnnnnnnnnnnnnnnnnnnnnnnnnnnnnnnnnnnnnnnnnnnnnnnnnnnnnnnnnnnnnnnnnnnnnnnnnnnnnnnnnnnnnnnnnnnnnnnnnnnnnnnnnnnnnnnnnnnnnnnnnnnnnnnnnnnnnnnnnnnnnnnnnnnnnnnnnnnnnnnnnnnnnnnnnnnnnnnnnnnnnnnnnnnnnnnnnnnnnnnnnnnnnnnnnnnnnnnnnnnnnnnnnnnnnnnnnnnnnnnnnnnnnnnnnnnnnnnnnnnnnnnnnnnnnnnnnnnnnnnnnnnnnnnnnnnnnnnnnnnnnnnnnnnnnnnnnnnnnnnnnnnnnnnnnnnnnnnnnnnnnnnnnnnnnnnnnnnnnnnnnnnnnnnnnnnnnnnnnnnnnnnnnnnnnnnnnnnnnnnnnnnnnnnnnnnnnnnnnnnnnnnnnnnnnnnnnnnnnnnnnnnnnnnnnnnnnnnnnnnnnnnnnnnnnnnnnnnnnnnnnnnnnnnnnnnnnnnnnnnnnnnnnnnnnnnnnnnnnnnnnnnnnnnnnnnnnnnnnnnnnnnnnnnnnnnnnnnnnnnnnnnnnnnnnnnnnnnnnnnnnnnnnnnnnnnnnnnnnnnnnnnnnnnnnnnnnnnnnnnnnnnnnnnnnnnnnnnnnnnnnnnnnnnnnnnnnnnnnnnnnnnnnnnnnnnnnnnnnnnnnnnnnnnnnnnnnnnnnnnnnnnnnnnnnnnnnnnnnnnnnnnnnnnnnnnnnnnnnnnnnnnnnnnnnnnnnnnnnnnnnnnnnnnnnnnnnnnnnnnnnnnnnnnnnnnnnnnnnnnnnnnnnnnnnnnnnnnnnnnnnnnnnnnnnnnnnnnnnnnnnnnnnnnnnnnnnnnnnnnnnnnnnnnnnnnnnnnnnnnnnnnnnnnnnnnnnnnnnnnnnnnnnnnnnnnnnnnnnnnnnnnnnnnnnnnnnnnnnnnnnnnnnnnnnnnnnnnnnnnnnnnnnnnnnnnnnnnnnnnnnnnnnnnnnnnnnnnnnnnnnnnnnnnnnnnnnnnnnnnnnnnnnnnnnnnnnnnnnnnnnnnnnnnnnnnnnnnnnnnnnnnnnnnnnnnnnnnnnnnnnnnnnnnnnnnnnnnnnnnnnnnnnnnnnnnnnnnnnnnnnnnnnnnnnnnnnnnnnnnnnnnnnnnnnnnnnnnnnnnnnnnnnnnnnnnnnnnnnnnnnnnnnnnnnnnnnnnnnnnnnnnnnnnnnnnnnnnnnnnnnnnnnnnnnnnnnnnnnnnnnnnnnnnnnnnnnnnnnnnnnnnnnnnnnnnnnnnnnnnnnnnnnnnnnnnnnnnnnnnnnnnnnnnnnnnnnnnnnnnnnnnnnnnnnnnnnnnnnnnnnnnnnnnnnnnnnnnnnnnnnnnnnnnnnnnnnnnnnnnnnnnnnnnnnnnnnnnnnnnnnnnnnnnnnnnnnnnnnnnnnnnnnnnnnnnnnnnnnnnnnnnnnnnnnnnnnnnnnnnnnnnnnnnnnnnnnnnnnnnnnnnnnnnnnnnnnnnnnnnnnnnnnnnnnnnnnnnnnnnnnnnnnnnnnnnnnnnnnnnnnnnnnnnnnnnnnnnnnnnnnnnnnnnnnnnnnnnnnnnnnnnnnnnnnnnnnnnnnnnnnnnnnnnnnnnnnnnnnnnnnnnnnnnnnnnnnnnnnnnnnnnnnnnnnnnnnnnnnnnnnnnnnnnnnnnnnnnnnnnnnnnnnnnnnnnnnnnnnnnnnnnnnnnnnnnnnnnnnnnnnnnnnnnnnnnnnnnnnnnnnnnnnnnnnnnnnnnnnnnnnnnnnnnnnnnnnnnnnnnnnnnnnnnnnnnnnnnnnnnnnnnnnnnnnnnnnnnnnnnnnnnnnnnnnnnnnnnnnnnnnnnnnnnnnnnnnnnnnnnnnnnnnnnnnnnnnnnnnnnnnnnnnnnnnnnnnnnnnnnnnnnnnnnnnnnnnnnnnnnnnnnnnnnnnnnnnnnnnnnnnnnnnnnnnnnnnnnnnnnnnnnnnnnnnnnnnnnnnnnnnnnnnnnnnnnnnnnnnnnnnnnnnnnnnnnnnnnnnnnnnnnnnnnnnnnnnnnnnnnnnnnnnnnnnnnnnnnnnnnnnnnnnnnnnnnnnnnnnnnnnnnnnnnnnnnnnnnnnnnnnnnnnnnnnnnnnnnnnnnnnnnnnnnnnnnnnnnnnnnnnnnnnnnnnnnnnnnnnnnnnnnnnnnnnnnnnnnnnnnnnnnnnnnnnnnnnnnnnnnnnnnnnnnnnnnnnnnnnnnnnnnnnnnnnnnnnnnnnnnnnnnnnnnnnnnnnnnnnnnnnnnnnnnnnnnnnnnnnnnnnnnnnnnnnnnnnnnnnnnnnnnnnnnnnnnnnnnnnnnnnnnnnnnnnnnnnnnnnnnnnnnnnnnnnnnnnnnnnnnnnnnnnnnnnnnnnnnnnnnnnnnnnnnnnnnnnnnnnnnnnnnnnnnnnnnnnnnnnnnnnnnnnnnnnnnnnnnnnnnnnnnnnnnnnnnnnnnnnnnnnnnnnnnnnnnnnnnnnnnnnnnnnnnnnnnnnnnnnnnnnnnnnnnnnnnnnnnnnnnnnnnnnnnnnnnnnnnnnnnnnnnnnnnnnnnnnnnnnnnnnnnnnnnnnnnnnnnnnnnnnnnnnnnnnnnnnnnnnnnnnnnnnnnnnnnnnnnnnnnnnnnnnnnnnnnnnnnnnnnnnnnnnnnnnnnnnnnnnnnnnnnnnnnnnnnnnnnnnnnnnnnnnnnnnnnnnnnnnnnnnnnnnnnnnnnnnnnnnnnnnnnnnnnnnnnnnnnnnnnnnnnnnnnnnnnnnnnnnnnnnnnnnnnnnnnnnnnnnnnnnnnnnnnnnnnnnnnnnnnnnnnnnnnnnnnnnnnnnnnnnnnnnnnnnnnnnnnnnnnnnnnnnnnnnnnnnnnnnnnnnnnnnnnnnnnnnnnnnnnnnnnnnnnnnnnnnnnnnnnnnnnnnnnnnnnnnnnnnnnnnnnnnnnnnnnnnnnnnnnnnnnnnnnnnnnnnnnnnnnnnnnnnnnnnnnnnnnnnnnnnnnnnnnnnnnnnnnnnnnnnnnnnnnnnnnnnnnnnnnnnnnnnnnnnnnnnnnnnnnnnnnnnnnnnnnnnnnnnnnnnnnnnnnnnnnnnnnnnnnnnnnnnnnnnnnnnnnnnnnnnnnnnnnnnnnnnnnnnnnnnnnnnnnnnnnnnnnnnnnnnnnnnnnnnnnnnnnnnnnnnnnnnnnnnnnnnnnnnnnnnnnnnnnnnnnnnnnnnnnnnnnnnnnnnnnnnnnnnnnnnnnnnnnnnnnnnnnnnnnnnnnnnnnnnnnnnnnnnnnnnnnnnnnnnnnnnnnnnnnnnnnnnnnnnnnnnnnnnnnnnnnnnnnnnnnnnnnnnnnnnnnnnnnnnnnnnnnnnnnnnnnnnnnnnnnnnnnnnnnnnnnnnnnnnnnnnnnnnnnnnnnnnnnnnnnnnnnnnnnnnnnnnnnnnnnnnnnnnnnnnnnnnnnnnnnnnnnnnnnnnnnnnnnnnnnnnnnnnnnnnnnnnnnnnnnnnnnnnnnnnnnnnnnnnnnnnnnnnnnnnnnnnnnnnnnnnnnnnnnnnnnnnnnnnnnnnnnnnnnnnnnnnnnnnnnnnnnnnnnnnnnnnnnnnnnnnnnnnnnnnnnnnnnnnnnnnnnnnnnnnnnnnnnnnnnnnnnnnnnnnnnnnnnnnnnnnnnnnnnnnnnnnnnnnnnnnnnnnnnnnnnnnnnnnnnnnnnnnnnnnnnnnnnnnnnnnnnnnnnnnnnnnnnnnnnnnnnnnnnnnnnnnnnnnnnnnnnnnnnnnnnnnnnnnnnnnnnnnnnnnnnnnnnnnnnnnnnnnnnnnnnnnnnnnnnnnnnnnnnnnnnnnnnnnnnnnnnnnnnnnnnnnnnnnnnnnnnnnnnnnnnnnnnnnnnnnnnnnnnnnnnnnnnnnnnnnnnnnnnnnnnnnnnnnnnnnnnnnnnnnnnnnnnnnnnnnnnnnnnnnnnnnnnnnnnnnnnnnnnnnnnnnnnnnnnnnnnnnnnnnnnnnnnnnnnnnnnnnnnnnnnnnnnnnnnnnnnnnnnnnnnnnnnnnnnnnnnnnnnnnnnnnnnnnnnnnnnnnnnnnnnnnnnnnnnnnnnnnnnnnnnnnnnnnnnnnnnnnnnnnnnnnnnnnnnnnnnnnnnnnnnnnnnnnnnnnnnnnnnnnnnnnnnnnnnnnnnnnnnnnnnnnnnnnnnnnnnnnnnnnnnnnnnnnnnnnnnnnnnnnnnnnnnnnnnnnnnnnnnnnnnnnnnnnnnnnnnnnnnnnnnnnnnnnnnnnnnnnnnnnnnnnnnnnnnnnnnnnnnnnnnnnnnnnnnnnnnnnnnnnnnnnnnnnnnnnnnnnnnnnnnnnnnnnnnnnnnnnnnnnnnnnnnnnnnnnnnnnnnnnnnnnnnnnnnnnnnnnnnnnnnnnnnnnnnnnnnnnnnnnnnnnnnnnnnnnnnnnnnnnnnnnnnnnnnnnnnnnnnnnnnnnnnnnnnnnnnnnnnnnnnnnnnnnnnnnnnnnnnnnnnnnnnnnnnnnnnnnnnnnnnnnnnnnnnnnnnnnnnnnnnnnnnnnnnnnnnnnnnnnnnnnnnnnnnnnnnnnnnnnnnnnnnnnnnnnnnnnnnnnnnnnnnnnnnnnnnnnnnnnnnnnnnnnnnnnnnnnnnnnnnnnnnnnnnnnnnnnnnnnnnnnnnnnnnnnnnnnnnnnnnnnnnnnnnnnnnnnnnnnnnnnnnnnnnnnnnnnnnnnnnnnnnnnnnnnnnnnnnnnnnnnnnnnnnnnnnnnnnnnnnnnnnnnnnnnnnnnnnnnnnnnnnnnnnnnnnnnnnnnnnnnnnnnnnnnnnnnnnnnnnnnnnnnnnnnnnnnnnnnnnnnnnnnnnnnnnnnnnnnnnnnnnnnnnnnnnnnnnnnnnnnnnnnnnnnnnnnnnnnnnnnnnnnnnnnnnnnnnnnnnnnnnnnnnnnnnnnnnnnnnnnnnnnnnnnnnnnnnnnnnnnnnnnnnnnnnnnnnnnnnnnnnnnnnnnnnnnnnnnnnnnnnnnnnnnnnnnnnnnnnnnnnnnnnnnnnnnnnnnnnnnnnnnnnnnnnnnnnnnnnnnnnnnnnnnnnnnnnnnnnnnnnnnnnnnnnnnnnnnnnnnnnnnnnnnnnnnnnnnnnnnnnnnnnnnnnnnnnnnnnnnnnnnnnnnnnnnnnnnnnnnnnnnnnnnnnnnnnnnnnnnnnnnnnnnnnnnnnnnnnnnnnnnnnnnnnnnnnnnnnnnnnnnnnnnnnnnnnnnnnnnnnnnnnnnnnnnnnnnnnnnnnnnnnnnnnnnnnnnnnnnnnnnnnnnnnnnnnnnnnnnnnnnnnnnnnnnnnnnnnnnnnnnnnnnnnnnnnnnnnnnnnnnnnnnnnnnnnnnnnnnnnnnnnnnnnnnnnnnnnnnnnnnnnnnnnnnnnnnnnnnnnnnnnnnnnnnnnnnnnnnnnnnnnnnnnnnnnnnnnnnnnnnnnnnnnnnnnnnnnnnnnnnnnnnnnnnnnnnnnnnnnnnnnnnnnnnnnnnnnnnnnnnnnnnnnnnnnnnnnnnnnnnnnnnnnnnnnnnnnnnnnnnnnnnnnnnnnnnnnnnnnnnnnnnnnnnnnnnnnnnnnnnnnnnnnnnnnnnnnnnnnnnnnnnnnnnnnnnnnnnnnnnnnnnnnnnnnnnnnnnnnnnnnnnnnnnnnnnnnnnnnnnnnnnnnnnnnnnnnnnnnnnnnnnnnnnnnnnnnnnnnnnnnnnnnnnnnnnnnnnnnnnnnnnnnnnnnnnnnnnnnnnnnnnnnnnnnnnnnnnnnnnnnnnnnnnnnnnnnnnnnnnnnnnnnnnnnnnnnnnnnnnnnnnnnnnnnnnnnnnnnnnnnnnnnnnnnnnnnnnnnnnnnnnnnnnnnnnnnnnnnnnnnnnnnnnnnnnnnnnnnnnnnnnnnnnnnnnnnnnnnnnnnnnnnnnnnnnnnnnnnnnnnnnnnnnnnnnnnnnnnnnnnnnnnnnnnnnnnnnnnnnnnnnnnnnnnnnnnnnnnnnnnnnnnnnnnnnnnnnnnnnnnnnnnnnnnnnnnnnnnnnnnnnnnnnnnnnnnnnnnnnnnnnnnnnnnnnnnnnnnnnnnnnnnnnnnnnnnnnnnnnnnnnnnnnnnnnnnnnnnnnnnnnnnnnnnnnnnnnnnnnnnnnnnnnnnnnnnnnnnnnnnnnnnnnnnnnnnnnnnnnnnnnnnnnnnnnnnnnnnnnnnnnnnnnnnnnnnnnnnnnnnnnnnnnnnnnnnnnnnnnnnnnnnnnnnnnnnnnnnnnnnnnnnnnnnnnnnnnnnnnnnnnnnnnnnnnnnnnnnnnnnnnnnnnnnnnnnnnnnnnnnnnnnnnnnnnnnnnnnnnnnnnnnnnnnnnnnnnnnnnnnnnnnnnnnnnnnnnnnnnnnnnnnnnnnnnnnnnnnnnnnnnnnnnnnnnnnnnnnnnnnnnnnnnnnnnnnnnnnnnnnnnnnnnnnnnnnnnnnnnnnnnnnnnnnnnnnnnnnnnnnnnnnnnnnnnnnnnnnnnnnnnnnnnnnnnnnnnnnnnnnnnnnnnnnnnnnnnnnnnnnnnnnnnnnnnnnnnnnnnnnnnnnnnnnnnnnnnnnnnnnnnnnnnnnnnnnnnnnnnnnnnnnnnnnnnnnnnnnnnnnnnnnnnnnnnnnnnnnnnnnnnnnnnnnnnnnnnnnnnnnnnnnnnnnnnnnnnnnnnnnnnnnnnnnnnnnnnnnnnnnnnnnnnnnnnnnnnnnnnnnnnnnnnnnnnnnnnnnnnnnnnnnnnnnnnnnnnnnnnnnnnnnnnnnnnnnnnnnnnnnnnnnnnnnnnnnnnnnnnnnnnnnnnnnnnnnnnnnnnnnnnnnnnnnnnnnnnnnnnnnnnnnnnnnnnnnnnnnnnnnnnnnnnnnnnnnnnnnnnnnnnnnnnnnnnnnnnnnnnnnnnnnnnnnnnnnnnnnnnnnnnnnnnnnnnnnnnnnnnnnnnnnnnnnnnnnnnnnnnnnnnnnnnnnnnnnnnnnnnnnnnnnnnnnnnnnnnnnnnnnnnnnnnnnnnnnnnnnnnnnnnnnnnnnnnnnnnnnnnnnnnnnnnnnnnnnnnnnnnnnnnnnnnnnnnnnnnnnnnnnnnnnnnnnnnnnnnnnnnnnnnnnnnnnnnnnnnnnnnnnnnnnnnnnnnnnnnnnnnnnnnnnnnnnnnnnnnnnnnnnnnnnnnnnnnnnnnnnnnnnnnnnnnnnnnnnnnnnnnnnnnnnnnnnnnnnnnnnnnnnnnnnnnnnnnnnnnnnnnnnnnnnnnnnnnnnnnnnnnnnnnnnnnnnnnnnnnnnnnnnnnnnnnnnnnnnnnnnnnnnnnnnnnnnnnnnnnnnnnnnnnnnnnnnnnnnnnnnnnnnnnnnnnnnnnnnnnnnnnnnnnnnnnnnnnnnnnnnnnnnnnnnnnnnnnnnnnnnnnnnnnnnnnnnnnnnnnnnnnnnnnnnnnnnnnnnnnnnnnnnnnnnnnnnnnnnnnnnnnnnnnnnnnnnnnnnnnnnnnnnnnnnnnnnnnnnnnnnnnnnnnnnnnnnnnnnnnnnnnnnnnnnnnnnnnnnnnnnnnnnnnnnnnnnnnnnnnnnnnnnnnnnnnnnnnnnnnnnnnnnnnnnnnnnnnnnnnnnnnnnnnnnnnnnnnnnnnnnnnnnnnnnnnnnnnnnnnnnnnnnnnnnnnnnnnnnnnnnnnnnnnnnnnnnnnnnnnnnnnnnnnnnnnnnnnnnnnnnnnnnnnnnnnnnnnnnnnnnnnnnnnnnnnnnnnnnnnnnnnnnnnnnnnnnnnnnnnnnnnnnnnnnnnnnnnnnnnnnnnnnnnnnnnnnnnnnnnnnnnnnnnnnnnnnnnnnnnnnnnnnnnnnnnnnnnnnnnnnnnnnnnnnnnnnnnnnnnnnnnnnnnnnnnnnnnnnnnnnnnnnnnnnnnnnnnnnnnnnnnnnnnnnnnnnnnnnnnnnnnnnnnnnnnnnnnnnnnnnnnnnnnnnnnnnnnnnnnnnnnnnnnnnnnnnnnnnnnnnnnnnnnnnnnnnnnnnnnnnnnnnnnnnnnnnnnnnnnnnnnnnnnnnnnnnnnnnnnnnnnnnnnnnnnnnnnnnnnnnnnnnnnnnnnnnnnnnnnnnnnnnnnnnnnnnnnnnnnnnnnnnnnnnnnnnnnnnnnnnnnnnnnnnnnnnnnnnnnnnnnnnnnnnnnnnnnnnnnnnnnnnnnnnnnnnnnnnnnnnnnnnnnnnnnnnnnnnnnnnnnnnnnnnnnnnnnnnnnnnnnnnnnnnnnnnnnnnnnnnnnnnnnnnnnnnnnnnnnnnnnnnnnnnnnnnnnnnnnnnnnnnnnnnnnnnnnnnnnnnnnnnnnnnnnnnnnnnnnnnnnnnnnnnnnnnnnnnnnnnnnnnnnnnnnnnnnnnnnnnnnnnnnnnnnnnnnnnnnnnnnnnnnnnnnnnnnnnnnnnnnnnnnnnnnnnnnnnnnnnnnnnnnnnnnnnnnnnnnnnnnnnnnnnnnnnnnnnnnnnnnnnnnnnnnnnnnnnnnnnnnnnnnnnnnnnnnnnnnnnnnnnnnnnnnnnnnnnnnnnnnnnnnnnnnnnnnnnnnnnnnnnnnnnnnnnnnnnnnnnnnnnnnnnnnnnnnnnnnnnnnnnnnnnnnnnnnnnnnnnnnnnnnnnnnnnnnnnnnnnnnnnnnnnnnnnnnnnnnnnnnnnnnnnnnnnnnnnnnnnnnnnnnnnnnnnnnnnnnnnnnnnnnnnnnnnnnnnnnnnnnnnnnnnnnnnnnnnnnnnnnnnnnnnnnnnnnnnnnnnnnnnnnnnnnnnnnnnnnnnnnnnnnnnnnnnnnnnnnnnnnnnnnnnnnnnnnnnnnnnnnnnnnnnnnnnnnnnnnnnnnnnnnnnnnnnnnnnnnnnnnnnnnnnnnnnnnnnnnnnnnnnnnnnnnnnnnnnnnnnnnnnnnnnnnnnnnnnnnnnnnnnnnnnnnnnnnnnnnnnnnnnnnnnnnnnnnnnnnnnnnnnnnnnnnnnnnnnnnnnnnnnnnnnnnnnnnnnnnnnnnnnnnnnnnnnnnnnnnnnnnnnnnnnnnnnnnnnnnnnnnnnnnnnnnnnnnnnnnnnnnnnnnnnnnnnnnnnnnnnnnnnnnnnnnnnnnnnnnnnnnnnnnnnnnnnnnnnnnnnnnnnnnnnnnnnnnnnnnnnnnnnnnnnnnnnnnnnnnnnnnnnnnnnnnnnnnnnnnnnnnnnnnnnnnnnnnnnnnnnnnnnnnnnnnnnnnnnnnnnnnnnnnnnnnnnnnnnnnnnnnnnnnnnnnnnnnnnnnnnnnnnnnnnnnnnnnnnnnnnnnnnnnnnnnnnnnnnnnnnnnnnnnnnnnnnnnnnnnnnnnnnnnnnnnnnnnnnnnnnnnnnnnnnnnnnnnnnnnnnnnnnnnnnnnnnnnnnnnnnnnnnnnnnnnnnnnnnnnnnnnnnnnnnnnnnnnnnnnnnnnnnnnnnnnnnnnnnnnnnnnnnnnnnnnnnnnnnnnnnnnnnnnnnnnnnnnnnnnnnnnnnnnnnnnnnnnnnnnnnnnnnnnnnnnnnnnnnnnnnnnnnnnnnnnnnnnnnnnnnnnnnnnnnnnnnnnnnnnnnnnnnnnnnnnnnnnnnnnnnnnnnnnnnnnnnnnnnnnnnnnnnnnnnnnnnnnnnnnnnnnnnnnnnnnnnnnnnnnnnnnnnnnnnnnnnnnnnnnnnnnnnnnnnnnnnnnnnnnnnnnnnnnnnnnnnnnnnnnnnnnnnnnnnnnnnnnnnnnnnnnnnnnnnnnnnnnnnnnnnnnnnnnnnnnnnnnnnnnnnnnnnnnnnnnnnnnnnnnnnnnnnnnnnnnnnnnnnnnnnnnnnnnnnnnnnnnnnnnnnnnnnnnnnnnnnnnnnnnnnnnnnnnnnnnnnnnnnnnnnnnnnnnnnnnnnnnnnnnnnnnnnnnnnnnnnnnnnnnnnnnnnnnnnnnnnnnnnnnnnnnnnnnnnnnnnnnnnnnnnnnnnnnnnnnnnnnnnnnnnnnnnnnnnnnnnnnnnnnnnnnnnnnnnnnnnnnnnnnnnnnnnnnnnnnnnnnnnnnnnnnnnnnnnnnnnnnnnnnnnnnnnnnnnnnnnnnnnnnnnnnnnnnnnnnnnnnnnnnnnnnnnnnnnnnnnnnnnnnnnnnnnnnnnnnnnnnnnnnnnnnnnnnnnnnnnnnnnnnnnnnnnnnnnnnnnnnnnnnnnnnnnnnnnnnnnnnnnnnnnnnnnnnnnnnnnnnnnnnnnnnnnnnnnnnnnnnnnnnnnnnnnnnnnnnnnnnnnnnnnnnnnnnnnnnnnnnnnnnnnnnnnnnnnnnnnnnnnnnnnnnnnnnnnnnnnnnnnnnnnnnnnnnnnnnnnnnnnnnnnnnnnnnnnnnnnnnnnnnnnnnnnnnnnnnnnnnnnnnnnnnnnnnnnnnnnnnnnnnnnnnnnnnnnnnnnnnnnnnnnnnnnnnnnnnnnnnnnnnnnnnnnnnnnnnnnnnnnnnnnnnnnnnnnnnnnnnnnnnnnnnnnnnnnnnnnnnnnnnnnnnnnnnnnnnnnnnnnnnnnnnnnnnnnnnnnnnnnnnnnnnnnnnnnnnnnnnnnnnnnnnnnnnnnnnnnnnnnnnnnnnnnnnnnnnnnnnnnnnnnnnnnnnnnnnnnnnnnnnnnnnnnnnnnnnnnnnnnnnnnnnnnnnnnnnnnnnnnnnnnnnnnnnnnnnnnnnnnnnnnnnnnnnnnnnnnnnnnnnnnnnnnnnnnnnnnnnnnnnnnnnnnnnnnnnnnnnnnnnnnnnnnnnnnnnnnnnnnnnnnnnnnnnnnnnnnnnnnnnnnnnnnnnnnnnnnnnnnnnnnnnnnnnnnnnnnnnnnnnnnnnnnnnnnnnnnnnnnnnnnnnnnnnnnnnnnnnnnnnnnnnnnnnnnnnnnnnnnnnnnnnnnnnnnnnnnnnnnnnnnnnnnnnnnnnnnnnnnnnnnnnnnnnnnnnnnnnnnnnnnnnnnnnnnnnnnnnnnnnnnnnnnnnnnnnnnnnnnnnnnnnnnnnnnnnnnnnnnnnnnnnnnnnnnnnnnnnnnnnnnnnnnnnnnnnnnnnnnnnnnnnnnnnnnnnnnnnnnnnnnnnnnnnnnnnnnnnnnnnnnnnnnnnnnnnnnnnnnnnnnnnnnnnnnnnnnnnnnnnnnnnnnnnnnnnnnnnnnnnnnnnnnnnnnnnnnnnnnnnnnnnnnnnnnnnnnnnnnnnnnnnnnnnnnnnnnnnnnnnnnnnnnnnnnnnnnnnnnnnnnnnnnnnnnnnnnnnnnnnnnnnnnnnnnnnnnnnnnnnnnnnnnnnnnnnnnnnnnnnnnnnnnnnnnnnnnnnnnnnnnnnnnnnnnnnnnnnnnnnnnnnnnnnnnnnnnnnnnnnnnnnnnnnnnnnnnnnnnnnnnnnnnnnnnnnnnnnnnnnnnnnnnnnnnnnnnnnnnnnnnnnnnnnnnnnnnnnnnnnnnnnnnnnnnnnnnnnnnnnnnnnnnnnnnnnnnnnnnnnnnnnnnnnnnnnnnnnnnnnnnnnnnnnnnnnnnnnnnnnnnnnnnnnnnnnnnnnnnnnnnnnnnnnnnnnnnnnnnnnnnnnnnnnnnnnnnnnnnnnnnnnnnnnnnnnnnnnnnnnnnnnnnnnnnnnnnnnnnnnnnnnnnnnnnnnnnnnnnnnnnnnnnnnnnnnnnnnnnnnnnnnnnnnnnnnnnnnnnnnnnnnnnnnnnnnnnnnnnnnnnnnnnnnnnnnnnnnnnnnnnnnnnnnnnnnnnnnnnnnnnnnnnnnnnnnnnnnnnnnnnnnnnnnnnnnnnnnnnnnnnnnnnnnnnnnnnnnnnnnnnnnnnnnnnnnnnnnnnnnnnnnnnnnnnnnnnnnnnnnnnnnnnnnnnnnnnnnnnnnnnnnnnnnnnnnnnnnnnnnnnnnnnnnnnnnnnnnnnnnnnnnnnnnnnnnnnnnnnnnnnnnnnnnnnnnnnnnnnnnnnnnnnnnnnnnnnnnnnnnnnnnnnnnnnnnnnnnnnnnnnnnnnnnnnnnnnnnnnnnnnnnnnnnnnnnnnnnnnnnnnnnnnnnnnnnnnnnnnnnnnnnnnnnnnnnnnnnnnnnnnnnnnnnnnnnnnnnnnnnnnnnnnnnnnnnnnnnnnnnnnnnnnnnnnnnnnnnnnnnnnnnnnnnnnnnnnnnnnnnnnnnnnnnnnnnnnnnnnnnnnnnnnnnnnnnnnnnnnnnnnnnnnnnnnnnnnnnnnnnnnnnnnnnnnnnnnnnnnnnnnnnnnnnnnnnnnnnnnnnnnnnnnnnnnnnnnnnnnnnnnnnnnnnnnnnnnnnnnnnnnnnnnnnnnnnnnnnnnnnnnnnnnnnnnnnnnnnnnnnnnnnnnnnnnnnnnnnnnnnnnnnnnnnnnnnnnnnnnnnnnnnnnnnnnnnnnnnnnnnnnnnnnnnnnnnnnnnnnnnnnnnnnnnnnnnnnnnnnnnnnnnnnnnnnnnnnnnnnnnnnnnnnnnnnnnnnnnnnnnnnnnnnnnnnnnnnnnnnnnnnnnnnnnnnnnnnnnnnnnnnnnnnnnnnnnnnnnnnnnnnnnnnnnnnnnnnnnnnnnnnnnnnnnnnnnnnnnnnnnnnnnnnnnnnnnnnnnnnnnnnnnnnnnnnnnnnnnnnnnnnnnnnnnnnnnnnnnnnnnnnnnnnnnnnnnnnnnnnnnnnnnnnnnnnnnnnnnnnnnnnnnnnnnnnnnnnnnnnnnnnnnnnnnnnnnnnnnnnnnnnnnnnnnnnnnnnnnnnnnnnnnnnnnnnnnnnnnnnnnnnnnnnnnnnnnnnnnnnnnnnnnnnnnnnnnnnnnnnnnnnnnnnnnnnnnnnnnnnnnnnnnnnnnnnnnnnnnnnnnnnnnnnnnnnnnnnnnnnnnnnnnnnnnnnnnnnnnnnnnnnnnnnnnnnnnnnnnnnnnnnnnnnnnnnnnnnnnnnnnnnnnnnnnnnnnnnnnnnnnnnnnnnnnnnnnnnnnnnnnnnnnnnnnnnnnnnnnnnnnnnnnnnnnnnnnnnnnnnnnnnnnnnnnnnnnnnnnnnnnnnnnnnnnnnnnnnnnnnnnnnnnnnnnnnnnnnnnnnnnnnnnnnnnnnnnnnnnnnnnnnnnnnnnnnnnnnnnnnnnnnnnnnnnnnnnnnnnnnnnnnnnnnnnnnnnnnnnnnnnnnnnnnnnnnnnnnnnnnnnnnnnnnnnnnnnnnnnnnnnnnnnnnnnnnnnnnnnnnnnnnnnnnnnnnnnnnnnnnnnnnnnnnnnnnnnnnnnnnnnnnnnnnnnnnnnnnnnnnnnnnnnnnnnnnnnnnnnnnnnnnnnnnnnnnnnnnnnnnnnnnnnnnnnnnnnnnnnnnnnnnnnnnnnnnnnnnnnnnnnnnnnnnnnnnnnnnnnnnnnnnnnnnnnnnnnnnnnnnnnnnnnnnnnnnnnnnnnnnnnnnnnnnnnnnnnnnnnnnnnnnnnnnnnnnnnnnnnnnnnnnnnnnnnnnnnnnnnnnnnnnnnnnnnnnnnnnnnnnnnnnnnnnnnnnnnnnnnnnnnnnnnnnnnnnnnnnnnnnnnnnnnnnnnnnnnnnnnnnnnnnnnnnnnnnnnnnnnnnnnnnnnnnnnnnnnnnnnnnnnnnnnnnnnnnnnnnnnnnnnnnnnnnnnnnnnnnnnnnnnnnnnnnnnnnnnnnnnnnnnnnnnnnnnnnnnnnnnnnnnnnnnnnnnnnnnnnnnnnnnnnnnnnnnnnnnnnnnnnnnnnnnnnnnnnnnnnnnnnnnnnnnnnnnnnnnnnnnnnnnnnnnnnnnnnnnnnnnnnnnnnnnnnnnnnnnnnnnnnnnnnnnnnnnnnnnnnnnnnnnnnnnnnnnnnnnnnnnnnnnnnnnnnnnnnnnnnnnnnnnnnnnnnnnnnnnnnnnnnnnnnnnnnnnnnnnnnnnnnnnnnnnnnnnnnnnnnnnnnnnnnnnnnnnnnnnnnnnnnnnnnnnnnnnnnnnnnnnnnnnnnnnnnnnnnnnnnnnnnnnnnnnnnnnnnnnnnnnnnnnnnnnnnnnnnnnnnnnnnnnnnnnnnnnnnnnnnnnnnnnnnnnnnnnnnnnnnnnnnnnnnnnnnnnnnnnnnnnnnnnnnnnnnnnnnnnnnnnnnnnnnnnnnnnnnnnnnnnnnnnnnnnnnnnnnnnnnnnnnnnnnnnnnnnnnnnnnnnnnnnnnnnnnnnnnnnnnnnnnnnnnnnnnnnnnnnnnnnnnnnnnnnnnnnnnnnnnnnnnnnnnnnnnnnnnnnnnnnnnnnnnnnnnnnnnnnnnnnnnnnnnnnnnnnnnnnnnnnnnnnnnnnnnnnnnnnnnnnnnnnnnnnnnnnnnnnnnnnnnnnnnnnnnnnnnnnnnnnnnnnnnnnnnnnnnnnnnnnnnnnnnnnnnnnnnnnnnnnnnnnnnnnnnnnnnnnnnnnnnnnnnnnnnnnnnnnnnnnnnnnnnnnnnnnnnnnnnnnnnnnnnnnnnnnnnnnnnnnnnnnnnnnnnnnnnnnnnnnnnnnnnnnnnnnnnnnnnnnnnnnnnnnnnnnnnnnnnnnnnnnnnnnnnnnnnnnnnnnnnnnnnnnnnnnnnnnnnnnnnnnnnnnnnnnnnnnnnnnnnnnnnnnnnnnnnnnnnnnnnnnnnnnnnnnnnnnnnnnnnnnnnnnnnnnnnnnnnnnnnnnnnnnnnnnnnnnnnnnnnnnnnnnnnnnnnnnnnnnnnnnnnnnnnnnnnnnnnnnnnnnnnnnnnnnnnnnnnnnnnnnnnnnnnnnnnnnnnnnnnnnnnnnnnnnnnnnnnnnnnnnnnnnnnnnnnnnnnnnnnnnnnnnnnnnnnnnnnnnnnnnnnnnnnnnnnnnnnnnnnnnnnnnnnnnnnnnnnnnnnnnnnnnnnnnnnnnnnnnnnnnnnnnnnnnnnnnnnnnnnnnnnnnnnnnnnnnnnnnnnnnnnnnnnnnnnnnnnnnnnnnnnnnnnnnnnnnnnnnnnnnnnnnnnnnnnnnnnnnnnnnnnnnnnnnnnnnnnnnnnnnnnnnnnnnnnnnnnnnnnnnnnnnnnnnnnnnnnnnnnnnnnnnnnnnnnnnnnnnnnnnnnnnnnnnnnnnnnnnnnnnnnnnnnnnnnnnnnnnnnnnnnnnnnnnnnnnnnnnnnnnnnnnnnnnnnnnnnnnnnnnnnnnnnnnnnnnnnnnnnnnnnnnnnnnnnnnnnnnnnnnnnnnnnnnnnnnnnnnnnnnnnnnnnnnnnnnnnnnnnnnnnnnnnnnnnnnnnnnnnnnnnnnnnnnnnnnnnnnnnnnnnnnnnnnnnnnnnnnnnnnnnnnnnnnnnnnnnnnnnnnnnnnnnnnnnnnnnnnnnnnnnnnnnnnnnnnnnnnnnnnnnnnnnnnnnnnnnnnnnnnnnnnnnnnnnnnnnnnnnnnnnnnnnnnnnnnnnnnnnnnnnnnnnnnnnnnnnnnnnnnnnnnnnnnnnnnnnnnnnnnnnnnnnnnnnnnnnnnnnnnnnnnnnnnnnnnnnnnnnnnnnnnnnnnnnnnnnnnnnnnnnnnnnnnnnnnnnnnnnnnnnnnnnnnnnnnnnnnnnnnnnnnnnnnnnnnnnnnnnnnnnnnnnnnnnnnnnnnnnnnnnnnnnnnnnnnnnnnnnnnnnnnnnnnnnnnnnnnnnnnnnnnnnnnnnnnnnnnnnnnnnnnnnnnnnnnnnnnnnnnnnnnnnnnnnnnnnnnnnnnnnnnnnnnnnnnnnnnnnnnnnnnnnnnnnnnnnnnnnnnnnnnnnnnnnnnnnnnnnnnnnnnnnnnnnnnnnnnnnnnnnnnnnnnnnnnnnnnnnnnnnnnnnnnnnnnnnnnnnnnnnnnnnnnnnnnnnnnnnnnnnnnnnnnnnnnnnnnnnnnnnnnnnnnnnnnnnnnnnnnnnnnnnnnnnnnnnnnnnnnnnnnnnnnnnnnnnnnnnnnnnnnnnnnnnnnnnnnnnnnnnnnnnnnnnnnnnnnnnnnnnnnnnnnnnnnnnnnnnnnnnnnnnnnnnnnnnnnnnnnnnnnnnnnnnnnnnnnnnnnnnnnnnnnnnnnnnnnnnnnnnnnnnnnnnnnnnnnnnnnnnnnnnnnnnnnnnnnnnnnnnnnnnnnnnnnnnnnnnnnnnnnnnnnnnnnnnnnnnnnnnnnnnnnnnnnnnnnnnnnnnnnnnnnnnnnnnnnnnnnnnnnnnnnnnnnnnnnnnnnnnnnnnnnnnnnnnnnnnnnnnnnnnnnnnnnnnnnnnnnnnnnnnnnnnnnnnnnnnnnnnnnnnnnnnnnnnnnnnnnnnnnnnnnnnnnnnnnnnnnnnnnnnnnnnnnnnnnnnnnnnnnnnnnnnnnnnnnnnnnnnnnnnnnnnnnnnnnnnnnnnnnnnnnnnnnnnnnnnnnnnnnnnnnnnnnnnnnnnnnnnnnnnnnnnnnnnnnnnnnnnnnnnnnnnnnnnnnnnnnnnnnnnnnnnnnnnnnnnnnnnnnnnnnnnnnnnnnnnnnnnnnnnnnnnnnnnnnnnnnnnnnnnnnnnnnnnnnnnnnnnnnnnnnnnnnnnnnnnnnnnnnnnnnnnnnnnnnnnnnnnnnnnnnnnnnnnnnnnnnnnnnnnnnnnnnnnnnnnnnnnnnnnnnnnnnnnnnnnnnnnnnnnnnnnnnnnnnnnnnnnnnnnnnnnnnnnnnnnnnnnnnnnnnnnnnnnnnnnnnnnnnnnnnnnnnnnnnnnnnnnnnnnnnnnnnnnnnnnnnnnnnnnnnnnnnnnnnnnnnnnnnnnnnnnnnnnnnnnnnnnnnnnnnnnnnnnnnnnnnnnnnnnnnnnnnnnnnnnnnnnnnnnnnnnnnnnnnnnnnnnnnnnnnnnnnnnnnnnnnnnnnnnnnnnnnnnnnnnnnnnnnnnnnnnnnnnnnnnnnnnnnnnnnnnnnnnnnnnnnnnnnnnnnnnnnnnnnnnnnnnnnnnnnnnnnnnnnnnnnnnnnnnnnnnnnnnnnnnnnnnnnnnnnnnnnnnnnnnnnnnnnnnnnnnnnnnnnnnnnnnnnnnnnnnnnnnnnnnnnnnnnnnnnnnnnnnnnnnnnnnnnnnnnnnnnnnnnnnnnnnnnnnnnnnnnnnnnnnnnnnnnnnnnnnnnnnnnnnnnnnnnnnnnnnnnnnnnnnnnnnnnnnnnnnnnnnnnnnnnnnnnnnnnnnnnnnnnnnnnnnnnnnnnnnnnnnnnnnnnnnnnnnnnnnnnnnnnnnnnnnnnnnnnnnnnnnnnnnnnnnnnnnnnnnnnnnnnnnnnnnnnnnnnnnnnnnnnnnnnnnnnnnnnnnnnnnnnnnnnnnnnnnnnnnnnnnnnnnnnnnnnnnnnnnnnnnnnnnnnnnnnnnnnnnnnnnnnnnnnnnnnnnnnnnnnnnnnnnnnnnnnnnnnnnnnnnnnnnnnnnnnnnnnnnnnnnnnnnnnnnnnnnnnnnnnnnnnnnnnnnnnnnnnnnnnnnnnnnnnnnnnnnnnnnnnnnnnnnnnnnnnnnnnnnnnnnnnnnnnnnnnnnnnnnnnnnnnnnnnnnnnnnnnnnnnnnnnnnnnnnnnnnnnnnnnnnnnnnnnnnnnnnnnnnnnnnnnnnnnnnnnnnnnnnnnnnnnnnnnnnnnnnnnnnnnnnnnnnnnnnnnnnnnnnnnnnnnnnnnnnnnnnnnnnnnnnnnnnnnnnnnnnnnnnnnnnnnnnnnnnnnnnnnnnnnnnnnnnnnnnnnnnnnnnnnnnnnnnnnnnnnnnnnnnnnnnnnnnnnnnnnnnnnnnnnnnnnnnnnnnnnnnnnnnnnnnnnnnnnnnnnnnnnnnnnnnnnnnnnnnnnnnnnnnnnnnnnnnnnnnnnnnnnnnnnnnnnnnnnnnnnnnnnnnnnnnnnnnnnnnnnnnnnnnnnnnnnnnnnnnnnnnnnnnnnnnnnnnnnnnnnnnnnnnnnnnnnnnnnnnnnnnnnnnnnnnnnnnnnnnnnnnnnnnnnnnnnnnnnnnnnnnnnnnnnnnnnnnnnnnnnnnnnnnnnnnnnnnnnnnnnnnnnnnnnnnnnnnnnnnnnnnnnnnnnnnnnnnnnnnnnnnnnnnnnnnnnnnnnnnnnnnnnnnnnnnnnnnnnnnnnnnnnnnnnnnnnnnnnnnnnnnnnnnnnnnnnnnnnnnnnnnnnnnnnnnnnnnnnnnnnnnnnnnnnnnnnnnnnnnnnnnnnnnnnnnnnnnnnnnnnnnnnnnnnnnnnnnnnnnnnnnnnnnnnnnnnnnnnnnnnnnnnnnnnnnnnnnnnnnnnnnnnnnnnnnnnnnnnnnnnnnnnnnnnnnnnnnnnnnnnnnnnnnnnnnnnnnnnnnnnnnnnnnnnnnnnnnnnnnnnnnnnnnnnnnnnnnnnnnnnnnnnnnnnnnnnnnnnnnnnnnnnnnnnnnnnnnnnnnnnnnnnnnnnnnnnnnnnnnnnnnnnnnnnnnnnnnnnnnnnnnnnnnnnnnnnnnnnnnnnnnnnnnnnnnnnnnnnnnnnnnnnnnnnnnnnnnnnnnnnnnnnnnnnnnnnnnnnnnnnnnnnnnnnnnnnnnnnnnnnnnnnnnnnnnnnnnnnnnnnnnnnnnnnnnnnnnnnnnnnnnnnnnnnnnnnnnnnnnnnnnnnnnnnnnnnnnnnnnnnnnnnnnnnnnnnnnnnnnnnnnnnnnnnnnnnnnnnnnnnnnnnnnnnnnnnnnnnnnnnnnnnnnnnnnnnnnnnnnnnnnnnnnnnnnnnnnnnnnnnnnnnnnnnnnnnnnnnnnnnnnnnnnnnnnnnnnnnnnnnnnnnnnnnnnnnnnnnnnnnnnnnnnnnnnnnnnnnnnnnnnnnnnnnnnnnnnnnnnnnnnnnnnnnnnnnnnnnnnnnnnnnnnnnnnnnnnnnnnnnnnnnnnnnnnnnnnnnnnnnnnnnnnnnnnnnnnnnnnnnnnnnnnnnnnnnnnnnnnnnnnnnnnnnnnnnnnnnnnnnnnnnnnnnnnnnnnnnnnnnnnnnnnnnnnnnnnnnnnnnnnnnnnnnnnnnnnnnnnnnnnnnnnnnnnnnnnnnnnnnnnnnnnnnnnnnnnnnnnnnnnnnnnnnnnnnnnnnnnnnnnnnnnnnnnnnnnnnnnnnnnnnnnnnnnnnnnnnnnnnnnnnnnnnnnnnnnnnnnnnnnnnnnnnnnnnnnnnnnnnnnnnnnnnnnnnnnnnnnnnnnnnnnnnnnnnnnnnnnnnnnnnnnnnnnnnnnnnnnnnnnnnnnnnnnnnnnnnnnnnnnnnnnnnnnnnnnnnnnnnnnnnnnnnnnnnnnnnnnnnnnnnnnnnnnnnnnnnnnnnnnnnnnnnnnnnnnnnnnnnnnnnnnnnnnnnnnnnnnnnnnnnnnnnnnnnnnnnnnnnnnnnnnnnnnnnnnnnnnnnnnnnnnnnnnnnnnnnnnnnnnnnnnnnnnnnnnnnnnnnnnnnnnnnnnnnnnnnnnnnnnnnnnnnnnnnnnnnnnnnnnnnnnnnnnnnnnnnnnnnnnnnnnnnnnnnnnnnnnnnnnnnnnnnnnnnnnnnnnnnnnnnnnnnnnnnnnnnnnnnnnnnnnnnnnnnnnnnnnnnnnnnnnnnnnnnnnnnnnnnnnnnnnnnnnnnnnnnnnnnnnnnnnnnnnnnnnnnnnnnnnnnnnnnnnnnnnnnnnnnnnnnnnnnnnnnnnnnnnnnnnnnnnnnnnnnnnnnnnnnnnnnnnnnnnnnnnnnnnnnnnnnnnnnnnnnnnnnnnnnnnnnnnnnnnnnnnnnnnnnnnnnnnnnnnnnnnnnnnnnnnnnnnnnnnnnnnnnnnnnnnnnnnnnnnnnnnnnnnnnnnnnnnnnnnnnnnnnnnnnnnnnnnnnnnnnnnnnnnnnnnnnnnnnnnnnnnnnnnnnnnnnnnnnnnnnnnnnnnnnnnnnnnnnnnnnnnnnnnnnnnnnnnnnnnnnnnnnnnnnnnnnnnnnnnnnnnnnnnnnnnnnnnnnnnnnnnnnnnnnnnnnnnnnnnnnnnnnnnnnnnnnnnnnnnnnnnnnnnnnnnnnnnnnnnnnnnnnnnnnnnnnnnnnnnnnnnnnnnnnnnnnnnnnnnnnnnnnnnnnnnnnnnnnnnnnnnnnnnnnnnnnnnnnnnnnnnnnnnnnnnnnnnnnnnnnnnnnnnnnnnnnnnnnnnnnnnnnnnnnnnnnnnnnnnnnnnnnnnnnnnnnnnnnnnnnnnnnnnnnnnnnnnnnnnnnnnnnnnnnnnnnnnnnnnnnnnnnnnnnnnnnnnnnnnnnnnnnnnnnnnnnnnnnnnnnnnnnnnnnnnnnnnnnnnnnnnnnnnnnnnnnnnnnnnnnnnnnnnnnnnnnnnnnnnnnnnnnnnnnnnnnnnnnnnnnnnnnnnnnnnnnnnnnnnnnnnnnnnnnnnnnnnnnnnnnnnnnnnnnnnnnnnnnnnnnnnnnnnnnnnnnnnnnnnnnnnnnnnnnnnnnnnnnnnnnnnnnnnnnnnnnnnnnnnnnnnnnnnnnnnnnnnnnnnnnnnnnnnnnnnnnnnnnnnnnnnnnnnnnnnnnnnnnnnnnnnnnnnnnnnnnnnnnnnnnnnnnnnnnnnnnnnnnnnnnnnnnnnnnnnnnnnnnnnnnnnnnnnnnnnnnnnnnnnnnnnnnnnnnnnnnnnnnnnnnnnnnnnnnnnnnnnnnnnnnnnnnnnnnnnnnnnnnnnnnnnnnnnnnnnnnnnnnnnnnnnnnnnnnnnnnnnnnnnnnnnnnnnnnnnnnnnnnnnnnnnnnnnnnnnnnnnnnnnnnnnnnnnnnnnnnnnnnnnnnnnnnnnnnnnnnnnnnnnnnnnnnnnnnnnnnnnnnnnnnnnnnnnnnnnnnnnnnnnnnnnnnnnnnnnnnnnnnnnnnnnnnnnnnnnnnnnnnnnnnnnnnnnnnnnnnnnnnnnnnnnnnnnnnnnnnnnnnnnnnnnnnnnnnnnnnnnnnnnnnnnnnnnnnnnnnnnnnnnnnnnnnnnnnnnnnnnnnnnnnnnnnnnnnnnnnnnnnnnnnnnnnnnnnnnnnnnnnnnnnnnnnnnnnnnnnnnnnnnnnnnnnnnnnnnnnnnnnnnnnnnnnnnnnnnnnnnnnnnnnnnnnnnnnnnnnnnnnnnnnnnnnnnnnnnnnnnnnnnnnnnnnnnnnnnnnnnnnnnnnnnnnnnnnnnnnnnnnnnnnnnnnnnnnnnnnnnnnnnnnnnnnnnnnnnnnnnnnnnnnnnnnnnnnnnnnnnnnnnnnnnnnnnnnnnnnnnnnnnnnnnnnnnnnnnnnnnnnnnnnnnnnnnnnnnnnnnnnnnnnnnnnnnnnnnnnnnnnnnnnnnnnnnnnnnnnnnnnnnnnnnnnnnnnnnnnnnnnnnnnnnnnnnnnnnnnnnnnnnnnnnnnnnnnnnnnnnnnnnnnnnnnnnnnnnnnnnnnnnnnnnnnnnnnnnnnnnnnnnnnnnnnnnnnnnnnnnnnnnnnnnnnnnnnnnnnnnnnnnnnnnnnnnnnnnnnnnnnnnnnnnnnnnnnnnnnnnnnnnnnnnnnnnnnnnnnnnnnnnnnnnnnnnnnnnnnnnnnnnnnnnnnnnnnnnnnnnnnnnnnnnnnnnnnnnnnnnnnnnnnnnnnnnnnnnnnnnnnnnnnnnnnnnnnnnnnnnnnnnnnnnnnnnnnnnnnnnnnnnnnnnnnnnnnnnnnnnnnnnnnnnnnnnnnnnnnnnnnnnnnnnnnnnnnnnnnnnnnnnnnnnnnnnnnnnnnnnnnnnnnnnnnnnnnnnnnnnnnnnnnnnnnnnnnnnnnnnnnnnnnnnnnnnnnnnnnnnnnnnnnnnnnnnnnnnnnnnnnnnnnnnnnnnnnnnnnnnnnnnnnnnnnnnnnnnnnnnnnnnnnnnnnnnnnnnnnnnnnnnnnnnnnnnnnnnnnnnnnnnnnnnnnnnnnnnnnnnnnnnnnnnnnnnnnnnnnnnnnnnnnnnnnnnnnnnnnnnnnnnnnnnnnnnnnnnnnnnnnnnnnnnnnnnnnnnnnnnnnnnnnnnnnnnnnnnnnnnnnnnnnnnnnnnnnnnnnnnnnnnnnnnnnnnnnnnnnnnnnnnnnnnnnnnnnnnnnnnnnnnnnnnnnnnnnnnnnnnnnnnnnnnnnnnnnnnnnnnnnnnnnnnnnnnnnnnnnnnnnnnnnnnnnnnnnnnnnnnnnnnnnnnnnnnnnnnnnnnnnnnnnnnnnnnnnnnnnnnnnnnnnnnnnnnnnnnnnnnnnnnnnnnnnnnnnnnnnnnnnnnnnnnnnnnnnnnnnnnnnnnnnnnnnnnnnnnnnnnnnnnnnnnnnnnnnnnnnnnnnnnnnnnnnnnnnnnnnnnnnnnnnnnnnnnnnnnnnnnnnnnnnnnnnnnnnnnnnnnnnnnnnnnnnnnnnnnnnnnnnnnnnnnnnnnnnnnnnnnnnnnnnnnnnnnnnnnnnnnnnnnnnnnnnnnnnnnnnnnnnnnnnnnnnnnnnnnnnnnnnnnnnnnnnnnnnnnnnnnnnnnnnnnnnnnnnnnnnnnnnnnnnnnnnnnnnnnnnnnnnnnnnnnnnnnnnnnnnnnnnnnnnnnnnnnnnnnnnnnnnnnnnnnnnnnnnnnnnnnnnnnnnnnnnnnnnnnnnnnnnnnnnnnnnnnnnnnnnnnnnnnnnnnnnnnnnnnnnnnnnnnnnnnnnnnnnnnnnnnnnnnnnnnnnnnnnnnnnnnnnnnnnnnnnnnnnnnnnnnnnnnnnnnnnnnnnnnnnnnnnnnnnnnnnnnnnnnnnnnnnnnnnnnnnnnnnnnnnnnnnnnnnnnnnnnnnnnnnnnnnnnnnnnnnnnnnnnnnnnnnnnnnnnnnnnnnnnnnnnnnnnnnnnnnnnnnnnnnnnnnnnnnnnnnnnnnnnnnnnnnnnnnnnnnnnnnnnnnnnnnnnnnnnnnnnnnnnnnnnnnnnnnnnnnnnnnnnnnnnnnnnnnnnnnnnnnnnnnnnnnnnnnnnnnnnnnnnnnnnnnnnnnnnnnnnnnnnnnnnnnnnnnnnnnnnnnnnnnnnnnnnnnnnnnnnnnnnnnnnnnnnnnnnnnnnnnnnnnnnnnnnnnnnnnnnnnnnnnnnnnnnnnnnnnnnnnnnnnnnnnnnnnnnnnnnnnnnnnnnnnnnnnnnnnnnnnnnnnnnnnnnnnnnnnnnnnnnnnnnnnnnnnnnnnnnnnnnnnnnnnnnnnnnnnnnnnnnnnnnnnnnnnnnnnnnnnnnnnnnnnnnnnnnnnnnnnnnnnnnnnnnnnnnnnnnnnnnnnnnnnnnnnnnnnnnnnnnnnnnnnnnnnnnnnnnnnnnnnnnnnnnnnnnnnnnnnnnnnnnnnnnnnnnnnnnnnnnnnnnnnnnnnnnnnnnnnnnnnnnnnnnnnnnnnnnnnnnnnnnnnnnnnnnnnnnnnnnnnnnnnnnnnnnnnnnnnnnnnnnnnnnnnnnnnnnnnnnnnnnnnnnnnnnnnnnnnnnnnnnnnnnnnnnnnnnnnnnnnnnnnnnnnnnnnnnnnnnnnnnnnnnnnnnnnnnnnnnnnnnnnnnnnnnnnnnnnnnnnnnnnnnnnnnnnnnnnnnnnnnnnnnnnnnnnnnnnnnnnnnnnnnnnnnnnnnnnnnnnnnnnnnnnnnnnnnnnnnnnnnnnnnnnnnnnnnnnnnnnnnnnnnnnnnnnnnnnnnnnnnnnnnnnnnnnnnnnnnnnnnnnnnnnnnnnnnnnnnnnnnnnnnnnnnnnnnnnnnnnnnnnnnnnnnnnnnnnnnnnnnnnnnnnnnnnnnnnnnnnnnnnnnnnnnnnnnnnnnnnnnnnnnnnnnnnnnnnnnnnnnnnnnnnnnnnnnnnnnnnnnnnnnnnnnnnnnnnnnnnnnnnnnnnnnnnnnnnnnnnnnnnnnnnnnnnnnnnnnnnnnnnnnnnnnnnnnnnnnnnnnnnnnnnnnnnnnnnnnnnnnnnnnnnnnnnnnnnnnnnnnnnnnnnnnnnnnnnnnnnnnnnnnnnnnnnnnnnnnnnnnnnnnnnnnnnnnnnnnnnnnnnnnnnnnnnnnnnnnnnnnnnnnnnnnnnnnnnnnnnnnnnnnnnnnnnnnnnnnnnnnnnnnnnnnnnnnnnnnnnnnnnnnnnnnnnnnnnnnnnnnnnnnnnnnnnnnnnnnnnnnnnnnnnnnnnnnnnnnnnnnnnnnnnnnnnnnnnnnnnnnnnnnnnnnnnnnnnnnnnnnnnnnnnnnnnnnnnnnnnnnnnnnnnnnnnnnnnnnnnnnnnnnnnnnnnnnnnnnnnnnnnnnnnnnnnnnnnnnnnnnnnnnnnnnnnnnnnnnnnnnnnnnnnnnnnnnnnnnnnnnnnnnnnnnnnnnnnnnnnnnnnnnnnnnnnnnnnnnnnnnnnnnnnnnnnnnnnnnnnnnnnnnnnnnnnnnnnnnnnnnnnnnnnnnnnnnnnnnnnnnnnnnnnnnnnnnnnnnnnnnnnnnnnnnnnnnnnnnnnnnnnnnnnnnnnnnnnnnnnnnnnnnnnnnnnnnnnnnnnnnnnnnnnnnnnnnnnnnnnnnnnnnnnnnnnnnnnnnnnnnnnnnnnnnnnnnnnnnnnnnnnnnnnnnnnnnnnnnnnnnnnnnnnnnnnnnnnnnnnnnnnnnnnnnnnnnnnnnnnnnnnnnnnnnnnnnnnnnnnnnnnnnnnnnnnnnnnnnnnnnnnnnnnnnnnnnnnnnnnnnnnnnnnnnnnnnnnnnnnnnnnnnnnnnnnnnnnnnnnnnnnnnnnnnnnnnnnnnnnnnnnnnnnnnnnnnnnnnnnnnnnnnnnnnnnnnnnnnnnnnnnnnnnnnnnnnnnnnnnnnnnnnnnnnnnnnnnnnnnnnnnnnnnnnnnnnnnnnnnnnnnnnnnnnnnnnnnnnnnnnnnnnnnnnnnnnnnnnnnnnnnnnnnnnnnnnnnnnnnnnnnnnnnnnnnnnnnnnnnnnnnnnnnnnnnnnnnnnnnnnnnnnnnnnnnnnnnnnnnnnnnnnnnnnnnnnnnnnnnnnnnnnnnnnnnnnnnnnnnnnnnnnnnnnnnnnnnnnnnnnnnnnnnnnnnnnnnnnnnnnnnnnnnnnnnnnnnnnnnnnnnnnnnnnnnnnnnnnnnnnnnnnnnnnnnnnnnnnnnnnnnnnnnnnnnnnnnnnnnnnnnnnnnnnnnnnnnnnnnnnnnnnnnnnnnnnnnnnnnnnnnnnnnnnnnnnnnnnnnnnnnnnnnnnnnnnnnnnnnnnnnnnnnnnnnnnnnnnnnnnnnnnnnnnnnnnnnnnnnnnnnnnnnnnnnnnnnnnnnnnnnnnnnnnnnnnnnnnnnnnnnnnnnnnnnnnnnnnnnnnnnnnnnnnnnnnnnnnnnnnnnnnnnnnnnnnnnnnnnnnnnnnnnnnnnnnnnnnnnnnnnnnnnnnnnnnnnnnnnnnnnnnnnnnnnnnnnnnnnnnnnnnnnnnnnnnnnnnnnnnnnnnnnnnnnnnnnnnnnnnnnnnnnnnnnnnnnnnnnnnnnnnnnnnnnnnnnnnnnnnnnnnnnnnnnnnnnnnnnnnnnnnnnnnnnnnnnnnnnnnnnnnnnnnnnnnnnnnnnnnnnnnnnnnnnnnnnnnnnnnnnnnnnnnnnnnnnnnnnnnnnnnnnnnnnnnnnnnnnnnnnnnnnnnnnnnnnnnnnnnnnnnnnnnnnnnnnnnnnnnnnnnnnnnnnnnnnnnnnnnnnnnnnnnnnnnnnnnnnnnnnnnnnnnnnnnnnnnnnnnnnnnnnnnnnnnnnnnnnnnnnnnnnnnnnnnnnnnnnnnnnnnnnnnnnnnnnnnnnnnnnnnnnnnnnnnnnnnnnnnnnnnnnnnnnnnnnnnnnnnnnnnnnnnnnnnnnnnnnnnnnnnnnnnnnnnnnnnnnnnnnnnnnnnnnnnnnnnnnnnnnnnnnnnnnnnnnnnnnnnnnnnnnnnnnnnnnnnnnnnnnnnnnnnnnnnnnnnnnnnnnnnnnnnnnnnnnnnnnnnnnnnnnnnnnnnnnnnnnnnnnnnnnnnnnnnnnnnnnnnnnnnnnnnnnnnnnnnnnnnnnnnnnnnnnnnnnnnnnnnnnnnnnnnnnnnnnnnnnnnnnnnnnnnnnnnnnnnnnnnnnnnnnnnnnnnnnnnnnnnnnnnnnnnnnnnnnnnnnnnnnnnnnnnnnnnnnnnnnnnnnnnnnnnnnnnnnnnnnnnnnnnnnnnnnnnnnnnnnnnnnnnnnnnnnnnnnnnnnnnnnnnnnnnnnnnnnnnnnnnnnnnnnnnnnnnnnnnnnnnnnnnnnnnnnnnnnnnnnnnnnnnnnnnnnnnnnnnnnnnnnnnnnnnnnnnnnnnnnnnnnnnnnnnnnnnnnnnnnnnnnnnnnnnnnnnnnnnnnnnnnnnnnnnnnnnnnnnnnnnnnnnnnnnnnnnnnnnnnnnnnnnnnnnnnnnnnnnnnnnnnnnnnnnnnnnnnnnnnnnnnnnnnnnnnnnnnnnnnnnnnnnnnnnnnnnnnnnnnnnnnnnnnnnnnnnnnnnnnnnnnnnnnnnnnnnnnnnnnnnnnnnnnnnnnnnnnnnnnnnnnnnnnnnnnnnnnnnnnnnnnnnnnnnnnnnnnnnnnnnnnnnnnnnnnnnnnnnnnnnnnnnnnnnnnnnnnnnnnnnnnnnnnnnnnnnnnnnnnnnnnnnnnnnnnnnnnnnnnnnnnnnnnnnnnnnnnnnnnnnnnnnnnnnnnnnnnnnnnnnnnnnnnnnnnnnnnnnnnnnnnnnnnnnnnnnnnnnnnnnnnnnnnnnnnnnnnnnnnnnnnnnnnnnnnnnnnnnnnnnnnnnnnnnnnnnnnnnnnnnnnnnnnnnnnnnnnnnnnnnnnnnnnnnnnnnnnnnnnnnnnnnnnnnnnnnnnnnnnnnnnnnnnnnnnnnnnnnnnnnnnnnnnnnnnnnnnnnnnnnnnnnnnnnnnnnnnnnnnnnnnnnnnnnnnnnnnnnnnnnnnnnnnnnnnnnnnnnnnnnnnnnnnnnnnnnnnnnnnnnnnnnnnnnnnnnnnnnnnnnnnnnnnnnnnnnnnnnnnnnnnnnnnnnnnnnnnnnnnnnnnnnnnnnnnnnnnnnnnnnnnnnnnnnnnnnnnnnnnnnnnnnnnnnnnnnnnnnnnnnnnnnnnnnnnnnnnnnnnnnnnnnnnnnnnnnnnnnnnnnnnnnnnnnnnnnnnnnnnnnnnnnnnnnnnnnnnnnnnnnnnnnnnnnnnnnnnnnnnnnnnnnnnnnnnnnnnnnnnnnnnnnnnnnnnnnnnnnnnnnnnnnnnnnnnnnnnnnnnnnnnnnnnnnnnnnnnnnnnnnnnnnnnnnnnnnnnnnnnnnnnnnnnnnnnnnnnnnnnnnnnnnnnnnnnnnnnnnnnnnnnnnnnnnnnnnnnnnnnnnnnnnnnnnnnnnnnnnnnnnnnnnnnnnnnnnnnnnnnnnnnnnnnnnnnnnnnnnnnnnnnnnnnnnnnnnnnnnnnnnnnnnnnnnnnnnnnnnnnnnnnnnnnnnnnnnnnnnnnnnnnnnnnnnnnnnnnnnnnnnnnnnnnnnnnnnnnnnnnnnnnnnnnnnnnnnnnnnnnnnnnnnnnnnnnnnnnnnnnnnnnnnnnnnnnnnnnnnnnnnnnnnnnnnnnnnnnnnnnnnnnnnnnnnnnnnnnnnnnnnnnnnnnnnnnnnnnnnnnnnnnnnnnnnnnnnnnnnnnnnnnnnnnnnnnnnnnnnnnnnnnnnnnnnnnnnnnnnnnnnnnnnnnnnnnnnnnnnnnnnnnnnnnnnnnnnnnnnnnnnnnnnnnnnnnnnnnnnnnnnnnnnnnnnnnnnnnnnnnnnnnnnnnnnnnnnnnnnnnnnnnnnnnnnnnnnnnnnnnnnnnnnnnnnnnnnnnnnnnnnnnnnnnnnnnnnnnnnnnnnnnnnnnnnnnnnnnnnnnnnnnnnnnnnnnnnnnnnnnnnnnnnnnnnnnnnnnnnnnnnnnnnnnnnnnnnnnnnnnnnnnnnnnnnnnnnnnnnnnnnnnnnnnnnnnnnnnnnnnnnnnnnnnnnnnnnnnnnnnnnnnnnnnnnnnnnnnnnnnnnnnnnnnnnnnnnnnnnnnnnnnnnnnnnnnnnnnnnnnnnnnnnnnnnnnnnnnnnnnnnnnnnnnnnnnnnnnnnnnnnnnnnnnnnnnnnnnnnnnnnnnnnnnnnnnnnnnnnnnnnnnnnnnnnnnnnnnnnnnnnnnnnnnnnnnnnnnnnnnnnnnnnnnnnnnnnnnnnnnnnnnnnnnnnnnnnnnnnnnnnnnnnnnnnnnnnnnnnnnnnnnnnnnnnnnnnnnnnnnnnnnnnnnnnnnnnnnnnnnnnnnnnnnnnnnnnnnnnnnnnnnnnnnnnnnnnnnnnnnnnnnnnnnnnnnnnnnnnnnnnnnnnnnnnnnnnnnnnnnnnnnnnnnnnnnnnnnnnnnnnnnnnnnnnnnnnnnnnnnnnnnnnnnnnnnnnnnnnnnnnnnnnnnnnnnnnnnnnnnnnnnnnnnnnnnnnnnnnnnnnnnnnnnnnnnnnnnnnnnnnnnnnnnnnnnnnnnnnnnnnnnnnnnnnnnnnnnnnnnnnnnnnnnnnnnnnnnnnnnnnnnnnnnnnnnnnnnnnnnnnnnnnnnnnnnnnnnnnnnnnnnnnnnnnnnnnnnnnnnnnnnnnnnnnnnnnnnnnnnnnnnnnnnnnnnnnnnnnnnnnnnnnnnnnnnnnnnnnnnnnnnnnnnnnnnnnnnnnnnnnnnnnnnnnnnnnnnnnnnnnnnnnnnnnnnnnnnnnnnnnnnnnnnnnnnnnnnnnnnnnnnnnnnnnnnnnnnnnnnnnnnnnnnnnnnnnnnnnnnnnnnnnnnnnnnnnnnnnnnnnnnnnnnnnnnnnnnnnnnnnnnnnnnnnnnnnnnnnnnnnnnnnnnnnnnnnnnnnnnnnnnnnnnnnnnnnnnnnnnnnnnnnnnnnnnnnnnnnnnnnnnnnnnnnnnnnnnnnnnnnnnnnnnnnnnnnnnnnnnnnnnnnnnnnnnnnnnnnnnnnnnnnnnnnnnnnnnnnnnnnnnnnnnnnnnnnnnnnnnnnnnnnnnnnnnnnnnnnnnnnnnnnnnnnnnnnnnnnnnnnnnnnnnnnnnnnnnnnnnnnnnnnnnnnnnnnnnnnnnnnnnnnnnnnnnnnnnnnnnnnnnnnnnnnnnnnnnnnnnnnnnnnnnnnnnnnnnnnnnnnnnnnnnnnnnnnnnnnnnnnnnnnnnnnnnnnnnnnnnnnnnnnnnnnnnnnnnnnnnnnnnnnnnnnnnnnnnnnnnnnnnnnnnnnnnnnnnnnnnnnnnnnnnnnnnnnnnnnnnnnnnnnnnnnnnnnnnnnnnnnnnnnnnnnnnnnnnnnnnnnnnnnnnnnnnnnnnnnnnnnnnnnnnnnnnnnnnnnnnnnnnnnnnnnnnnnnnnnnnnnnnnnnnnnnnnnnnnnnnnnnnnnnnnnnnnnnnnnnnnnnnnnnnnnnnnnnnnnnnnnnnnnnnnnnnnnnnnnnnnnnnnnnnnnnnnnnnnnnnnnnnnnnnnnnnnnnnnnnnnnnnnnnnnnnnnnnnnnnnnnnnnnnnnnnnnnnnnnnnnnnnnnnnnnnnnnnnnnnnnnnnnnnnnnnnnnnnnnnnnnnnnnnnnnnnnnnnnnnnnnnnnnnnnnnnnnnnnnnnnnnnnnnnnnnnnnnnnnnnnnnnnnnnnnnnnnnnnnnnnnnnnnnnnnnnnnnnnnnnnnnnnnnnnnnnnnnnnnnnnnnnnnnnnnnnnnnnnnnnnnnnnnnnnnnnnnnnnnnnnnnnnnnnnnnnnnnnnnnnnnnnnnnnnnnnnnnnnnnnnnnnnnnnnnnnnnnnnnnnnnnnnnnnnnnnnnnnnnnnnnnnnnnnnnnnnnnnnnnnnnnnnnnnnnnnnnnnnnnnnnnnnnnnnnnnnnnnnnnnnnnnnnnnnnnnnnnnnnnnnnnnnnnnnnnnnnnnnnnnnnnnnnnnnnnnnnnnnnnnnnnnnnnnnnnnnnnnnnnnnnnnnnnnnnnnnnnnnnnnnnnnnnnnnnnnnnnnnnnnnnnnnnnnnnnnnnnnnnnnnnnnnnnnnnnnnnnnnnnnnnnnnnnnnnnnnnnnnnnnnnnnnnnnnnnnnnnnnnnnnnnnnnnnnnnnnnnnnnnnnnnnnnnnnnnnnnnnnnnnnnnnnnnnnnnnnnnnnnnnnnnnnnnnnnnnnnnnnnnnnnnnnnnnnnnnnnnnnnnnnnnnnnnnnnnnnnnnnnnnnnnnnnnnnnnnnnnnnnnnnnnnnnnnnnnnnnnnnnnnnnnnnnnnnnnnnnnnnnnnnnnnnnnnnnnnnnnnnnnnnnnnnnnnnnnnnnnnnnnnnnnnnnnnnnnnnnnnnnnnnnnnnnnnnnnnnnnnnnnnnnnnnnnnnnnnnnnnnnnnnnnnnnnnnnnnnnnnnnnnnnnnnnnnnnnnnnnnnnnnnnnnnnnnnnnnnnnnnnnnnnnnnnnnnnnnnnnnnnnnnnnnnnnnnnnnnnnnnnnnnnnnnnnnnnnnnnnnnnnnnnnnnnnnnnnnnnnnnnnnnnnnnnnnnnnnnnnnnnnnnnnnnnnnnnnnnnnnnnnnnnnnnnnnnnnnnnnnnnnnnnnnnnnnnnnnnnnnnnnnnnnnnnnnnnnnnnnnnnnnnnnnnnnnnnnnnnnnnnnnnnnnnnnnnnnnnnnnnnnnnnnnnnnnnnnnnnnnnnnnnnnnnnnnnnnnnnnnnnnnnnnnnnnnnnnnnnnnnnnnnnnnnnnnnnnnnnnnnnnnnnnnnnnnnnnnnnnnnnnnnnnnnnnnnnnnnnnnnnnnnnnnnnnnnnnnnnnnnnnnnnnnnnnnnnnnnnnnnnnnnnnnnnnnnnnnnnnnnnnnnnnnnnnnnnnnnnnnnnnnnnnnnnnnnnnnnnnnnnnnnnnnnnnnnnnnnnnnnnnnnnnnnnnnnnnnnnnnnnnnnnnnnnnnnnnnnnnnnnnnnnnnnnnnnnnnnnnnnnnnnnnnnnnnnnnnnnnnnnnnnnnnnnnnnnnnnnnnnnnnnnnnnnnnnnnnnnnnnnnnnnnnnnnnnnnnnnnnnnnnnnnnnnnnnnnnnnnnnnnnnnnnnnnnnnnnnnnnnnnnnnnnnnnnnnnnnnnnnnnnnnnnnnnnnnnnnnnnnnnnnnnnnnnnnnnnnnnnnnnnnnnnnnnnnnnnnnnnnnnnnnnnnnnnnnnnnnnnnnnnnnnnnnnnnnnnnnnnnnnnnnnnnnnnnnnnnnnnnnnnnnnnnnnnnnnnnnnnnnnnnnnnnnnnnnnnnnnnnnnnnnnnnnnnnnnnnnnnnnnnnnnnnnnnnnnnnnnnnnnnnnnnnnnnnnnnnnnnnnnnnnnnnnnnnnnnnnnnnnnnnnnnnnnnnnnnnnnnnnnnnnnnnnnnnnnnnnnnnnnnnnnnnnnnnnnnnnnnnnnnnnnnnnnnnnnnnnnnnnnnnnnnnnnnnnnnnnnnnnnnnnnnnnnnnnnnnnnnnnnnnnnnnnnnnnnnnnnnnnnnnnnnnnnnnnnnnnnnnnnnnnnnnnnnnnnnnnnnnnnnnnnnnnnnnnnnnnnnnnnnnnnnnnnnnnnnnnnnnnnnnnnnnnnnnnnnnnnnnnnnnnnnnnnnnnnnnnnnnnnnnnnnnnnnnnnnnnnnnnnnnnnnnnnnnnnnnnnnnnnnnnnnnnnnnnnnnnnnnnnnnnnnnnnnnnnnnnnnnnnnnnnnnnnnnnnnnnnnnnnnnnnnnnnnnnnnnnnnnnnnnnnnnnnnnnnnnnnnnnnnnnnnnnnnnnnnnnnnnnnnnnnnnnnnnnnnnnnnnnnnnnnnnnnnnnnnnnnnnnnnnnnnnnnnnnnnnnnnnnnnnnnnnnnnnnnnnnnnnnnnnnnnnnnnnnnnnnnnnnnnnnnnnnnnnnnnnnnnnnnnnnnnnnnnnnnnnnnnnnnnnnnnnnnnnnnnnnnnnnnnnnnnnnnnnnnnnnnnnnnnnnnnnnnnnnnnnnnnnnnnnnnnnnnnnnnnnnnnnnnnnnnnnnnnnnnnnnnnnnnnnnnnnnnnnnnnnnnnnnnnnnnnnnnnnnnnnnnnnnnnnnnnnnnnnnnnnnnnnnnnnnnnnnnnnnnnnnnnnnnnnnnnnnnnnnnnnnnnnnnnnnnnnnnnnnnnnnnnnnnnnnnnnnnnnnnnnnnnnnnnnnnnnnnnnnnnnnnnnnnnnnnnnnnnnnnnnnnnnnnnnnnnnnnnnnnnnnnnnnnnnnnnnnnnnnnnnnnnnnnnnnnnnnnnnnnnnnnnnnnnnnnnnnnnnnnnnnnnnnnnnnnnnnnnnnnnnnnnnnnnnnnnnnnnnnnnnnnnnnnnnnnnnnnnnnnnnnnnnnnnnnnnnnnnnnnnnnnnnnnnnnnnnnnnnnnnnnnnnnnnnnnnnnnnnnnnnnnnnnnnnnnnnnnnnnnnnnnnnnnnnnnnnnnnnnnnnnnnnnnnnnnnnnnnnnnnnnnnnnnnnnnnnnnnnnnnnnnnnnnnnnnnnnnnnnnnnnnnnnnnnnnnnnnnnnnnnnnnnnnnnnnnnnnnnnnnnnnnnnnnnnnnnnnnnnnnnnnnnnnnnnnnnnnnnnnnnnnnnnnnnnnnnnnnnnnnnnnnnnnnnnnnnnnnnnnnnnnnnnnnnnnnnnnnnnnnnnnnnnnnnnnnnnnnnnnnnnnnnnnnnnnnnnnnnnnnnnnnnnnnnnnnnnnnnnnnnnnnnnnnnnnnnnnnnnnnnnnnnnnnnnnnnnnnnnnnnnnnnnnnnnnnnnnnnnnnnnnnnnnnnnnnnnnnnnnnnnnnnnnnnnnnnnnnnnnnnnnnnnnnnnnnnnnnnnnnnnnnnnnnnnnnnnnnnnnnnnnnnnnnnnnnnnnnnnnnnnnnnnnnnnnnnnnnnnnnnnnnnnnnnnnnnnnnnnnnnnnnnnnnnnnnnnnnnnnnnnnnnnnnnnnnnnnnnnnnnnnnnnnnnnnnnnnnnnnnnnnnnnnnnnnnnnnnnnnnnnnnnnnnnnnnnnnnnnnnnnnnnnnnnnnnnnnnnnnnnnnnnnnnnnnnnnnnnnnnnnnnnnnnnnnnnnnnnnnnnnnnnnnnnnnnnnnnnnnnnnnnnnnnnnnnnnnnnnnnnnnnnnnnnnnnnnnnnnnnnnnnnnnnnnnnnnnnnnnnnnnnnnnnnnnnnnnnnnnnnnnnnnnnnnnnnnnnnnnnnnnnnnnnnnnnnnnnnnnnnnnnnnnnnnnnnnnnnnnnnnnnnnnnnnnnnnnnnnnnnnnnnnnnnnnnnnnnnnnnnnnnnnnnnnnnnnnnnnnnnnnnnnnnnnnnnnnnnnnnnnnnnnnnnnnnnnnnnnnnnnnnnnnnnnnnnnnnnnnnnnnnnnnnnnnnnnnnnnnnnnnnnnnnnnnnnnnnnnnnnnnnnnnnnnnnnnnnnnnnnnnnnnnnnnnnnnnnnnnnnnnnnnnnnnnnnnnnnnnnnnnnnnnnnnnnnnnnnnnnnnnnnnnnnnnnnnnnnnnnnnnnnnnnnnnnnnnnnnnnnnnnnnnnnnnnnnnnnnnnnnnnnnnnnnnnnnnnnnnnnnnnnnnnnnnnnnnnnnnnnnnnnnnnnnnnnnnnnnnnnnnnnnnnnnnnnnnnnnnnnnnnnnnnnnnnnnnnnnnnnnnnnnnnnnnnnnnnnnnnnnnnnnnnnnnnnnnnnnnnnnnnnnnnnnnnnnnnnnnnnnnnnnnnnnnnnnnnnnnnnnnnnnnnnnnnnnnnnnnnnnnnnnnnnnnnnnnnnnnnnnnnnnnnnnnnnnnnnnnnnnnnnnnnnnnnnnnnnnnnnnnnnnnnnnnnnnnnnnnnnnnnnnnnnnnnnnnnnnnnnnnnnnnnnnnnnnnnnnnnnnnnnnnnnnnnnnnnnnnnnnnnnnnnnnnnnnnnnnnnnnnnnnnnnnnnnnnnnnnnnnnnnnnnnnnnnnnnnnnnnnnnnnnnnnnnnnnnnnnnnnnnnnnnnnnnnnnnnnnnnnnnnnnnnnnnnnnnnnnnnnnnnnnnnnnnnnnnnnnnnnnnnnnnnnnnnnnnnnnnnnnnnnnnnnnnnnnnnnnnnnnnnnnnnnnnnnnnnnnnnnnnnnnnnnnnnnnnnnnnnnnnnnnnnnnnnnnnnnnnnnnnnnnnnnnnnnnnnnnnnnnnnnnnnnnnnnnnnnnnnnnnnnnnnnnnnnnnnnnnnnnnnnnnnnnnnnnnnnnnnnnnnnnnnnnnnnnnnnnnnnnnnnnnnnnnnnnnnnnnnnnnnnnnnnnnnnnnnnnnnnnnnnnnnnnnnnnnnnnnnnnnnnnnnnnnnnnnnnnnnnnnnnnnnnnnnnnnnnnnnnnnnnnnnnnnnnnnnnnnnnnnnnnnnnnnnnnnnnnnnnnnnnnnnnnnnnnnnnnnnnnnnnnnnnnnnnnnnnnnnnnnnnnnnnnnnnnnnnnnnnnnnnnnnnnnnnnnnnnnnnnnnnnnnnnnnnnnnnnnnnnnnnnnnnnnnnnnnnnnnnnnnnnnnnnnnnnnnnnnnnnnnnnnnnnnnnnnnnnnnnnnnnnnnnnnnnnnnnnnnnnnnnnnnnnnnnnnnnnnnnnnnnnnnnnnnnnnnnnnnnnnnnnnnnnnnnnnnnnnnnnnnnnnnnnnnnnnnnnnnnnnnnnnnnnnnnnnnnnnnnnnnnnnnnnnnnnnnnnnnnnnnnnnnnnnnnnnnnnnnnnnnnnnnnnnnnnnnnnnnnnnnnnnnnnnnnnnnnnnnnnnnnnnnnnnnnnnnnnnnnnnnnnnnnnnnnnnnnnnnnnnnnnnnnnnnnnnnnnnnnnnnnnnnnnnnnnnnnnnnnnnnnnnnnnnnnnnnnnnnnnnnnnnnnnnnnnnnnnnnnnnnnnnnnnnnnnnnnnnnnnnnnnnnnnnnnnnnnnnnnnnnnnnnnnnnnnnnnnnnnnnnnnnnnnnnnnnnnnnnnnnnnnnnnnnnnnnnnnnnnnnnnnnnnnnnnnnnnnnnnnnnnnnnnnnnnnnnnnnnnnnnnnnnnnnnnnnnnnnnnnnnnnnnnnnnnnnnnnnnnnnnnnnnnnnnnnnnnnnnnnnnnnnnnnnnnnnnnnnnnnnnnnnnnnnnnnnnnnnnnnnnnnnnnnnnnnnnnnnnnnnnnnnnnnnnnnnnnnnnnnnnnnnnnnnnnnnnnnnnnnnnnnnnnnnnnnnnnnnnnnnnnnnnnnnnnnnnnnnnnnnnnnnnnnnnnnnnnnnnnnnnnnnnnnnnnnnnnnnnnnnnnnnnnnnnnnnnnnnnnnnnnnnnnnnnnnnnnnnnnnnnnnnnnnnnnnnnnnnnnnnnnnnnnnnnnnnnnnnnnnnnnnnnnnnnnnnnnnnnnnnnnnnnnnnnnnnnnnnnnnnnnnnnnnnnnnnnnnnnnnnnnnnnnnnnnnnnnnnnnnnnnnnnnnnnnnnnnnnnnnnnnnnnnnnnnnnnnnnnnnnnnnnnnnnnnnnnnnnnnnnnnnnnnnnnnnnnnnnnnnnnnnnnnnnnnnnnnnnnnnnnnnnnnnnnnnnnnnnnnnnnnnnnnnnnnnnnnnnnnnnnnnnnnnnnnnnnnnnnnnnnnnnnnnnnnnnnnnnnnnnnnnnnnnnnnnnnnnnnnnnnnnnnnnnnnnnnnnnnnnnnnnnnnnnnnnnnnnnnnnnnnnnnnnnnnnnnnnnnnnnnnnnnnnnnnnnnnnnnnnnnnnnnnnnnnnnnnnnnnnnnnnnnnnnnnnnnnnnnnnnnnnnnnnnnnnnnnnnnnnnnnnnnnnnnnnnnnnnnnnnnnnnnnnnnnnnnnnnnnnnnnnnnnnnnnnnnnnnnnnnnnnnnnnnnnnnnnnnnnnnnnnnnnnnnnnnnnnnnnnnnnnnnnnnnnnnnnnnnnnnnnnnnnnnnnnnnnnnnnnnnnnnnnnnnnnnnnnnnnnnnnnnnnnnnnnnnnnnnnnnnnnnnnnnnnnnnnnnnnnnnnnnnnnnnnnnnnnnnnnnnnnnnnnnnnnnnnnnnnnnnnnnnnnnnnnnnnnnnnnnnnnnnnnnnnnnnnnnnnnnnnnnnnnnnnnnnnnnnnnnnnnnnnnnnnnnnnnnnnnnnnnnnnnnnnnnnnnnnnnnnnnnnnnnnnnnnnnnnnnnnnnnnnnnnnnnnnnnnnnnnnnnnnnnnnnnnnnnnnnnnnnnnnnnnnnnnnnnnnnnnnnnnnnnnnnnnnnnnnnnnnnnnnnnnnnnnnnnnnnnnnnnnnnnnnnnnnnnnnnnnnnnnnnnnnnnnnnnnnnnnnnnnnnnnnnnnnnnnnnnnnnnnnnnnnnnnnnnnnnnnnnnnnnnnnnnnnnnnnnnnnnnnnnnnnnnnnnnnnnnnnnnnnnnnnnnnnnnnnnnnnnnnnnnnnnnnnnnnnnnnnnnnnnnnnnnnnnnnnnnnnnnnnnnnnnnnnnnnnnnnnnnnnnnnnnnnnnnnnnnnnnnnnnnnnnnnnnnnnnnnnnnnnnnnnnnnnnnnnnnnnnnnnnnnnnnnnnnnnnnnnnnnnnnnnnnnnnnnnnnnnnnnnnnnnnnnnnnnnnnnnnnnnnnnnnnnnnnnnnnnnnnnnnnnnnnnnnnnnnnnnnnnnnnnnnnnnnnnnnnnnnnnnnnnnnnnnnnnnnnnnnnnnnnnnnnnnnnnnnnnnnnnnnnnnnnnnnnnnnnnnnnnnnnnnnnnnnnnnnnnnnnnnnnnnnnnnnnnnnnnnnnnnnnnnnnnnnnnnnnnnnnnnnnnnnnnnnnnnnnnnnnnnnnnnnnnnnnnnnnnnnnnnnnnnnnnnnnnnnnnnnnnnnnnnnnnnnnnnnnnnnnnnnnnnnnnnnnnnnnnnnnnnnnnnnnnnnnnnnnnnnnnnnnnnnnnnnnnnnnnnnnnnnnnnnnnnnnnnnnnnnnnnnnnnnnnnnnnnnnnnnnnnnnnnnnnnnnnnnnnnnnnnnnnnnnnnnnnnnnnnnnnnnnnnnnnnnnnnnnnnnnnnnnnnnnnnnnnnnnnnnnnnnnnnnnnnnnnnnnnnnnnnnnnnnnnnnnnnnnnnnnnnnnnnnnnnnnnnnnnnnnnnnnnnnnnnnnnnnnnnnnnnnnnnnnnnnnnnnnnnnnnnnnnnnnnnnnnnnnnnnnnnnnnnnnnnnnnnnnnnnnnnnnnnnnnnnnnnnnnnnnnnnnnnnnnnnnnnnnnnnnnnnnnnnnnnnnnnnnnnnnnnnnnnnnnnnnnnnnnnnnnnnnnnnnnnnnnnnnnnnnnnnnnnnnnnnnnnnnnnnnnnnnnnnnnnnnnnnnnnnnnnnnnnnnnnnnnnnnnnnnnnnnnnnnnnnnnnnnnnnnnnnnnnnnnnnnnnnnnnnnnnnnnnnnnnnnnnnnnnnnnnnnnnnnnnnnnnnnnnnnnnnnnnnnnnnnnnnnnnnnnnnnnnnnnnnnnnnnnnnnnnnnnnnnnnnnnnnnnnnnnnnnnnnnnnnnnnnnnnnnnnnnnnnnnnnnnnnnnnnnnnnnnnnnnnnnnnnnnnnnnnnnnnnnnnnnnnnnnnnnnnnnnnnnnnnnnnnnnnnnnnnnnnnnnnnnnnnnnnnnnnnnnnnnnnnnnnnnnnnnnnnnnnnnnnnnnnnnnnnnnnnnnnnnnnnnnnnnnnnnnnnnnnnnnnnnnnnnnnnnnnnnnnnnnnnnnnnnnnnnnnnnnnnnnnnnnnnnnnnnnnnnnnnnnnnnnnnnnnnnnnnnnnnnnnnnnnnnnnnnnnnnnnnnnnnnnnnnnnnnnnnnnnnnnnnnnnnnnnnnnnnnnnnnnnnnnnnnnnnnnnnnnnnnnnnnnnnnnnnnnnnnnnnnnnnnnnnnnnnnnnnnnnnnnnnnnnnnnnnnnnnnnnnnnnnnnnnnnnnnnnnnnnnnnnnnnnnnnnnnnnnnnnnnnnnnnnnnnnnnnnnnnnnnnnnnnnnnnnnnnnnnnnnnnnnnnnnnnnnnnnnnnnnnnnnnnnnnnnnnnnnnnnnnnnnnnnnnnnnnnnnnnnnnnnnnnnnnnnnnnnnnnnnnnnnnnnnnnnnnnnnnnnnnnnnnnnnnnnnnnnnnnnnnnnnnnnnnnnnnnnnnnnnnnnnnnnnnnnnnnnnnnnnnnnnnnnnnnnnnnnnnnnnnnnnnnnnnnnnnnnnnnnnnnnnnnnnnnnnnnnnnnnnnnnnnnnnnnnnnnnnnnnnnnnnnnnnnnnnnnnnnnnnnnnnnnnnnnnnnnnnnnnnnnnnnnnnnnnnnnnnnnnnnnnnnnnnnnnnnnnnnnnnnnnnnnnnnnnnnnnnnnnnnnnnnnnnnnnnnnnnnnnnnnnnnnnnnnnnnnnnnnnnnnnnnnnnnnnnnnnnnnnnnnnnnnnnnnnnnnnnnnnnnnnnnnnnnnnnnnnnnnnnnnnnnnnnnnnnnnnnnnnnnnnnnnnnnnnnnnnnnnnnnnnnnnnnnnnnnnnnnnnnnnnnnnnnnnnnnnnnnnnnnnnnnnnnnnnnnnnnnnnnnnnnnnnnnnnnnnnnnnnnnnnnnnnnnnnnnnnnnnnnnnnnnnnnnnnnnnnnnnnnnnnnnnnnnnnnnnnnnnnnnnnnnnnnnnnnnnnnnnnnnnnnnnnnnnnnnnnnnnnnnnnnnnnnnnnnnnnnnnnnnnnnnnnnnnnnnnnnnnnnnnnnnnnnnnnnnnnnnnnnnnnnnnnnnnnnnnnnnnnnnnnnnnnnnnnnnnnnnnnnnnnnnnnnnnnnnnnnnnnnnnnnnnnnnnnnnnnnnnnnnnnnnnnnnnnnnnnnnnnnnnnnnnnnnnnnnnnnnnnnnnnnnnnnnnnnnnnnnnnnnnnnnnnnnnnnnnnnnnnnnnnnnnnnnnnnnnnnnnnnnnnnnnnnnnnnnnnnnnnnnnnnnnnnnnnnnnnnnnnnnnnnnnnnnnnnnnnnnnnnnnnnnnnnnnnnnnnnnnnnnnnnnnnnnnnnnnnnnnnnnnnnnnnnnnnnnnnnnnnnnnnnnnnnnnnnnnnnnnnnnnnnnnnnnnnnnnnnnnnnnnnnnnnnnnnnnnnnnnnnnnnnnnnnnnnnnnnnnnnnnnnnnnnnnnnnnnnnnnnnnnnnnnnnnnnnnnnnnnnnnnnnnnnnnnnnnnnnnnnnnnnnnnnnnnnnnnnnnnnnnnnnnnnnnnnnnnnnnnnnnnnnnnnnnnnnnnnnnnnnnnnnnnnnnnnnnnnnnnnnnnnnnnnnnnnnnnnnnnnnnnnnnnnnnnnnnnnnnnnnnnnnnnnnnnnnnnnnnnnnnnnnnnnnnnnnnnnnnnnnnnnnnnnnnnnnnnnnnnnnnnnnnnnnnnnnnnnnnnnnnnnnnnnnnnnnnnnnnnnnnnnnnnnnnnnnnnnnnnnnnnnnnnnnnnnnnnnnnnnnnnnnnnnnnnnnnnnnnnnnnnnnnnnnnnnnnnnnnnnnnnnnnnnnnnnnnnnnnnnnnnnnnnnnnnnnnnnnnnnnnnnnnnnnnnnnnnnnnnnnnnnnnnnnnnnnnnnnnnnnnnnnnnnnnnnnnnnnnnnnnnnnnnnnnnnnnnnnnnnnnnnnnnnnnnnnnnnnnnnnnnnnnnnnnnnnnnnnnnnnnnnnnnnnnnnnnnnnnnnnnnnnnnnnnnnnnnnnnnnnnnnnnnnnnnnnnnnnnnnnnnnnnnnnnnnnnnnnnnnnnnnnnnnnnnnnnnnnnnnnnnnnnnnnnnnnnnnnnnnnnnnnnnnnnnnnnnnnnnnnnnnnnnnnnnnnnnnnnnnnnnnnnnnnnnnnnnnnnnnnnnnnnnnnnnnnnnnnnnnnnnnnnnnnnnnnnnnnnnnnnnnnnnnnnnnnnnnnnnnnnnnnnnnnnnnnnnnnnnnnnnnnnnnnnnnnnnnnnnnnnnnnnnnnnnnnnnnnnnnnnnnnnnnnnnnnnnnnnnnnnnnnnnnnnnnnnnnnnnnnnnnnnnnnnnnnnnnnnnnnnnnnnnnnnnnnnnnnnnnnnnnnnnnnnnnnnnnnnnnnnnnnnnnnnnnnnnnnnnnnnnnnnnnnnnnnnnnnnnnnnnnnnnnnnnnnnnnnnnnnnnnnnnnnnnnnnnnnnnnnnnnnnnnnnnnnnnnnnnnnnnnnnnnnnnnnnnnnnnnnnnnnnnnnnnnnnnnnnnnnnnnnnnnnnnnnnnnnnnnnnnnnnnnnnnnnnnnnnnnnnnnnnnnnnnnnnnnnnnnnnnnnnnnnnnnnnnnnnnnnnnnnnnnnnnnnnnnnnnnnnnnnnnnnnnnnnnnnnnnnnnnnnnnnnnnnnnnnnnnnnnnnnnnnnnnnnnnnnnnnnnnnnnnnnnnnnnnnnnnnnnnnnnnnnnnnnnnnnnnnnnnnnnnnnnnnnnnnnnnnnnnnnnnnnnnnnnnnnnnnnnnnnnnnnnnnnnnnnnnnnnnnnnnnnnnnnnnnnnnnnnnnnnnnnnnnnnnnnnnnnnnnnnnnnnnnnnnnnnnnnnnnnnnnnnnnnnnnnnnnnnnnnnnnnnnnnnnnnnnnnnnnnnnnnnnnnnnnnnnnnnnnnnnnnnnnnnnnnnnnnnnnnnnnnnnnnnnnnnnnnnnnnnnnnnnnnnnnnnnnnnnnnnnnnnnnnnnnnnnnnnnnnnnnnnnnnnnnnnnnnnnnnnnnnnnnnnnnnnnnnnnnnnnnnnnnnnnnnnnnnnnnnnnnnnnnnnnnnnnnnnnnnnnnnnnnnnnnnnnnnnnnnnnnnnnnnnnnnnnnnnnnnnnnnnnnnnnnnnnnnnnnnnnnnnnnnnnnnnnnnnnnnnnnnnnnnnnnnnnnnnnnnnnnnnnnnnnnnnnnnnnnnnnnnnnnnnnnnnnnnnnnnnnnnnnnnnnnnnnnnnnnnnnnnnnnnnnnnnnnnnnnnnnnnnnnnnnnnnnnnnnnnnnnnnnnnnnnnnnnnnnnnnnnnnnnnnnnnnnnnnnnnnnnnnnnnnnnnnnnnnnnnnnnnnnnnnnnnnnnnnnnnnnnnnnnnnnnnnnnnnnnnnnnnnnnnnnnnnnnnnnnnnnnnnnnnnnnnnnnnnnnnnnnnnnnnnnnnnnnnnnnnnnnnnnnnnnnnnnnnnnnnnnnnnnnnnnnnnnnnnnnnnnnnnnnnnnnnnnnnnnnnnnnnnnnnnnnnnnnnnnnnnnnnnnnnnnnnnnnnnnnnnnnnnnnnnnnnnnnnnnnnnnnnnnnnnnnnnnnnnnnnnnnnnnnnnnnnnnnnnnnnnnnnnnnnnnnnnnnnnnnnnnnnnnnnnnnnnnnnnnnnnnnnnnnnnnnnnnnnnnnnnnnnnnnnnnnnnnnnnnnnnnnnnnnnnnnnnnnnnnnnnnnnnnnnnnnnnnnnnnnnnnnnnnnnnnnnnnnnnnnnnnnnnnnnnnnnnnnnnnnnnnnnnnnnnnnnnnnnnnnnnnnnnnnnnnnnnnnnnnnnnnnnnnnnnnnnnnnnnnnnnnnnnnnnnnnnnnnnnnnnnnnnnnnnnnnnnnnnnnnnnnnnnnnnnnnnnnnnnnnnnnnnnnnnnnnnnnnnnnnnnnnnnnnnnnnnnnnnnnnnnnnnnnnnnnnnnnnnnnnnnnnnnnnnnnnnnnnnnnnnnnnnnnnnnnnnnnnnnnnnnnnnnnnnnnnnnnnnnnnnnnnnnnnnnnnnnnnnnnnnnnnnnnnnnnnnnnnnnnnnnnnnnnnnnnnnnnnnnnnnnnnnnnnnnnnnnnnnnnnnnnnnnnnnnnnnnnnnnnnnnnnnnnnnnnnnnnnnnnnnnnnnnnnnnnnnnnnnnnnnnnnnnnnnnnnnnnnnnnnnnnnnnnnnnnnnnnnnnnnnnnnnnnnnnnnnnnnnnnnnnnnnnnnnnnnnnnnnnnnnnnnnnnnnnnnnnnnnnnnnnnnnnnnnnnnnnnnnnnnnnnnnnnnnnnnnnnnnnnnnnnnnnnnnnnnnnnnnnnnnnnnnnnnnnnnnnnnnnnnnnnnnnnnnnnnnnnnnnnnnnnnnnnnnnnnnnnnnnnnnnnnnnnnnnnnnnnnnnnnnnnnnnnnnnnnnnnnnnnnnnnnnnnnnnnnnnnnnnnnnnnnnnnnnnnnnnnnnnnnnnnnnnnnnnnnnnnnnnnnnnnnnnnnnnnnnnnnnnnnnnnnnnnnnnnnnnnnnnnnnnnnnnnnnnnnnnnnnnnnnnnnnnnnnnnnnnnnnnnnnnnnnnnnnnnnnnnnnnnnnnnnnnnnnnnnnnnnnnnnnnnnnnnnnnnnnnnnnnnnnnnnnnnnnnnnnnnnnnnnnnnnnnnnnnnnnnnnnnnnnnnnnnnnnnnnnnnnnnnnnnnnnnnnnnnnnnnnnnnnnnnnnnnnnnnnnnnnnnnnnnnnnnnnnnnnnnnnnnnnnnnnnnnnnnnnnnnnnnnnnnnnnnnnnnnnnnnnnnnnnnnnnnnnnnnnnnnnnnnnnnnnnnnnnnnnnnnnnnnnnnnnnnnnnnnnnnnnnnnnnnnnnnnnnnnnnnnnnnnnnnnnnnnnnnnnnnnnnnnnnnnnnnnnnnnnnnnnnnnnnnnnnnnnnnnnnnnnnnnnnnnnnnnnnnnnnnnnnnnnnnnnnnnnnnnnnnnnnnnnnnnnnnnnnnnnnnnnnnnnnnnnnnnnnnnnnnnnnnnnnnnnnnnnnnnnnnnnnnnnnnnnnnnnnnnnnnnnnnnnnnnnnnnnnnnnnnnnnnnnnnnnnnnnnnnnnnnnnnnnnnnnnnnnnnnnnnnnnnnnnnnnnnnnnnnnnnnnnnnnnnnnnnnnnnnnnnnnnnnnnnnnnnnnnnnnnnnnnnnnnnnnnnnnnnnnnnnnnnnnnnnnnnnnnnnnnnnnnnnnnnnnnnnnnnnnnnnnnnnnnnnnnnnnnnnnnnnnnnnnnnnnnnnnnnnnnnnnnnnnnnnnnnnnnnnnnnnnnnnnnnnnnnnnnnnnnnnnnnnnnnnnnnnnnnnnnnnnnnnnnnnnnnnnnnnnnnnnnnnnnnnnnnnnnnnnnnnnnnnnnnnnnnnnnnnnnnnnnnnnnnnnnnnnnnnnnnnnnnnnnnnnnnnnnnnnnnnnnnnnnnnnnnnnnnnnnnnnnnnnnnnnnnnnnnnnnnnnnnnnnnnnnnnnnnnnnnnnnnnnnnnnnnnnnnnnnnnnnnnnnnnnnnnnnnnnnnnnnnnnnnnnnnnnnnnnnnnnnnnnnnnnnnnnnnnnnnnnnnnnnnnnnnnnnnnnnnnnnnnnnnnnnnnnnnnnnnnnnnnnnnnnnnnnnnnnnnnnnnnnnnnnnnnnnnnnnnnnnnnnnnnnnnnnnnnnnnnnnnnnnnnnnnnnnnnnnnnnnnnnnnnnnnnnnnnnnnnnnnnnnnnnnnnnnnnnnnnnnnnnnnnnnnnnnnnnnnnnnnnnnnnnnnnnnnnnnnnnnnnnnnnnnnnnnnnnnnnnnnnnnnnnnnnnnnnnnnnnnnnnnnnnnnnnnnnnnnnnnnnnnnnnnnnnnnnnnnnnnnnnnnnnnnnnnnnnnnnnnnnnnnnnnnnnnnnnnnnnnnnnnnnnnnnnnnnnnnnnnnnnnnnnnnnnnnnnnnnnnnnnnnnnnnnnnnnnnnnnnnnnnnnnnnnnnnnnnnnnnnnnnnnnnnnnnnnnnnnnnnnnnnnnnnnnnnnnnnnnnnnnnnnnnnnnnnnnnnnnnnnnnnnnnnnnnnnnnnnnnnnnnnnnnnnnnnnnnnnnnnnnnnnnnnnnnnnnnnnnnnnnnnnnnnnnnnnnnnnnnnnnnnnnnnnnnnnnnnnnnnnnnnnnnnnnnnnnnnnnnnnnnnnnnnnnnnnnnnnnnnnnnnnnnnnnnnnnnnnnnnnnnnnnnnnnnnnnnnnnnnnnnnnnnnnnnnnnnnnnnnnnnnnnnnnnnnnnnnnnnnnnnnnnnnnnnnnnnnnnnnnnnnnnnnnnnnnnnnnnnnnnnnnnnnnnnnnnnnnnnnnnnnnnnnnnnnnnnnnnnnnnnnnnnnnnnnnnnnnnnnnnnnnnnnnnnnnnnnnnnnnnnnnnnnnnnnnnnnnnnnnnnnnnnnnnnnnnnnnnnnnnnnnnnnnnnnnnnnnnnnnnnnnnnnnnnnnnnnnnnnnnnnnnnnnnnnnnnnnnnnnnnnnnnnnnnnnnnnnnnnnnnnnnnnnnnnnnnnnnnnnnnnnnnnnnnnnnnnnnnnnnnnnnnnnnnnnnnnnnnnnnnnnnnnnnnnnnnnnnnnnnnnnnnnnnnnnnnnnnnnnnnnnnnnnnnnnnnnnnnnnnnnnnnnnnnnnnnnnnnnnnnnnnnnnnnnnnnnnnnnnnnnnnnnnnnnnnnnnnnnnnnnnnnnnnnnnnnnnnnnnnnnnnnnnnnnnnnnnnnnnnnnnnnnnnnnnnnnnnnnnnnnnnnnnnnnnnnnnnnnnnnnnnnnnnnnnnnnnnnnnnnnnnnnnnnnnnnnnnnnnnnnnnnnnnnnnnnnnnnnnnnnnnnnnnnnnnnnnnnnnnnnnnnnnnnnnnnnnnnnnnnnnnnnnnnnnnnnnnnnnnnnnnnnnnnnnnnnnnnnnnnnnnnnnnnnnnnnnnnnnnnnnnnnnnnnnnnnnnnnnnnnnnnnnnnnnnnnnnnnnnnnnnnnnnnnnnnnnnnnnnnnnnnnnnnnnnnnnnnnnnnnnnnnnnnnnnnnnnnnnnnnnnnnnnnnnnnnnnnnnnnnnnnnnnnnnnnnnnnnnnnnnnnnnnnnnnnnnnnnnnnnnnnnnnnnnnnnnnnnnnnnnnnnnnnnnnnnnnnnnnnnnnnnnnnnnnnnnnnnnnnnnnnnnnnnnnnnnnnnnnnnnnnnnnnnnnnnnnnnnnnnnnnnnnnnnnnnnnnnnnnnnnnnnnnnnnnnnnnnnnnnnnnnnnnnnnnnnnnnnnnnnnnnnnnnnnnnnnnnnnnnnnnnnnnnnnnnnnnnnnnnnnnnnnnnnnnnnnnnnnnnnnnnnnnnnnnnnnnnnnnnnnnnnnnnnnnnnnnnnnnnnnnnnnnnnnnnnnnnnnnnnnnnnnnnnnnnnnnnnnnnnnnnnnnnnnnnnnnnnnnnnnnnnnnnnnnnnnnnnnnnnnnnnnnnnnnnnnnnnnnnnnnnnnnnnnnnnnnnnnnnnnnnnnnnnnnnnnnnnnnnnnnnnnnnnnnnnnnnnnnnnnnnnnnnnnnnnnnnnnnnnnnnnnnnnnnnnnnnnnnnnnnnnnnnnnnnnnnnnnnnnnnnnnnnnnnnnnnnnnnnnnnnnnnnnnnnnnnnnnnnnnnnnnnnnnnnnnnnnnnnnnnnnnnnnnnnnnnnnnnnnnnnnnnnnnnnnnnnnnnnnnnnnnnnnnnnnnnnnnnnnnnnnnnnnnnnnnnnnnnnnnnnnnnnnnnnnnnnnnnnnnnnnnnnnnnnnnnnnnnnnnnnnnnnnnnnnnnnnnnnnnnnnnnnnnnnnnnnnnnnnnnnnnnnnnnnnnnnnnnnnnnnnnnnnnnnnnnnnnnnnnnnnnnnnnnnnnnnnnnnnnnnnnnnnnnnnnnnnnnnnnnnnnnnnnnnnnnnnnnnnnnnnnnnnnnnnnnnnnnnnnnnnnnnnnnnnnnnnnnnnnnnnnnnnnnnnnnnnnnnnnnnnnnnnnnnnnnnnnnnnnnnnnnnnnnnnnnnnnnnnnnnnnnnnnnnnnnnnnnnnnnnnnnnnnnnnnnnnnnnnnnnnnnnnnnnnnnnnnnnnnnnnnnnnnnnnnnnnnnnnnnnnnnnnnnnnnnnnnnnnnnnnnnnnnnnnnnnnnnnnnnnnnnnnnnnnnnnnnnnnnnnnnnnnnnnnnnnnnnnnnnnnnnnnnnnnnnnnnnnnnnnnnnnnnnnnnnnnnnnnnnnnnnnnnnnnnnnnnnnnnnnnnnnnnnnnnnnnnnnnnnnnnnnnnnnnnnnnnnnnnnnnnnnnnnnnnnnnnnnnnnnnnnnnnnnnnnnnnnnnnnnnnnnnnnnnnnnnnnnnnnnnnnnnnnnnnnnnnnnnnnnnnnnnnnnnnnnnnnnnnnnnnnnnnnnnnnnnnnnnnnnnnnnnnnnnnnnnnnnnnnnnnnnnnnnnnnnnnnnnnnnnnnnnnnnnnnnnnnnnnnnnnnnnnnnnnnnnnnnnnnnnnnnnnnnnnnnnnnnnnnnnnnnnnnnnnnnnnnnnnnnnnnnnnnnnnnnnnnnnnnnnnnnnnnnnnnnnnnnnnnnnnnnnnnnnnnnnnnnnnnnnnnnnnnnnnnnnnnnnnnnnnnnnnnnnnnnnnnnnnnnnnnnnnnnnnnnnnnnnnnnnnnnnnnnnnnnnnnnnnnnnnnnnnnnnnnnnnnnnnnnnnnnnnnnnnnnnnnnnnnnnnnnnnnnnnnnnnnnnnnnnnnnnnnnnnnnnnnnnnnnnnnnnnnnnnnnnnnnnnnnnnnnnnnnnnnnnnnnnnnnnnnnnnnnnnnnnnnnnnnnnnnnnnnnnnnnnnnnnnnnnnnnnnnnnnnnnnnnnnnnnnnnnnnnnnnnnnnnnnnnnnnnnnnnnnnnnnnnnnnnnnnnnnnnnnnnnnnnnnnnnnnnnnnnnnnnnnnnnnnnnnnnnnnnnnnnnnnnnnnnnnnnnnnnnnnnnnnnnnnnnnnnnnnnnnnnnnnnnnnnnnnnnnnnnnnnnnnnnnnnnnnnnnnnnnnnnnnnnnnnnnnnnnnnnnnnnnnnnnnnnnnnnnnnnnnnnnnnnnnnnnnnnnnnnnnnnnnnnnnnnnnnnnnnnnnnnnnnnnnnnnnnnnnnnnnnnnnnnnnnnnnnnnnnnnnnnnnnnnnnnnnnnnnnnnnnnnnnnnnnnnnnnnnnnnnnnnnnnnnnnnnnnnnnnnnnnnnnnnnnnnnnnnnnnnnnnnnnnnnnnnnnnnnnnnnnnnnnnnnnnnnnnnnnnnnnnnnnnnnnnnnnnnnnnnnnnnnnnnnnnnnnnnnnnnnnnnnnnnnnnnnnnnnnnnnnnnnnnnnnnnnnnnnnnnnnnnnnnnnnnnnnnnnnnnnnnnnnnnnnnnnnnnnnnnnnnnnnnnnnnnnnnnnnnnnnnnnnnnnnnnnnnnnnnnnnnnnnnnnnnnnnnnnnnnnnnnnnnnnnnnnnnnnnnnnnnnnnnnnnnnnnnnnnnnnnnnnnnnnnnnnnnnnnnnnnnnnnnnnnnnnnnnnnnnnnnnnnnnnnnnnnnnnnnnnnnnnnnnnnnnnnnnnnnnnnnnnnnnnnnnnnnnnnnnnnnnnnnnnnnnnnnnnnnnnnnnnnnnnnnnnnnnnnnnnnnnnnnnnnnnnnnnnnnnnnnnnnnnnnnnnnnnnnnnnnnnnnnnnnnnnnnnnnnnnnnnnnnnnnnnnnnnnnnnnnnnnnnnnnnnnnnnnnnnnnnnnnnnnnnnnnnnnnnnnnnnnnnnnnnnnnnnnnnnnnnnnnnnnnnnnnnnnnnnnnnnnnnnnnnnnnnnnnnnnnnnnnnnnnnnnnnnnnnnnnnnnnnnnnnnnnnnnnnnnnnnnnnnnnnnnnnnnnnnnnnnnnnnnnnnnnnnnnnnnnnnnnnnnnnnnnnnnnnnnnnnnnnnnnnnnnnnnnnnnnnnnnnnnnnnnnnnnnnnnnnnnnnnnnnnnnnnnnnnnnnnnnnnnnnnnnnnnnnnnnnnnnnnnnnnnnnnnnnnnnnnnnnnnnnnnnnnnnnnnnnnnnnnnnnnnnnnnnnnnnnnnnnnnnnnnnnnnnnnnnnnnnnnnnnnnnnnnnnnnnnnnnnnnnnnnnnnnnnnnnnnnnnnnnnnnnnnnnnnnnnnnnnnnnnnnnnnnnnnnnnnnnnnnnnnnnnnnnnnnnnnnnnnnnnnnnnnnnnnnnnnnnnnnnnnnnnnnnnnnnnnnnnnnnnnnnnnnnnnnnnnnnnnnnnnnnnnnnnnnnnnnnnnnnnnnnnnnnnnnnnnnnnnnnnnnnnnnnnnnnnnnnnnnnnnnnnnnnnnnnnnnnnnnnnnnnnnnnnnnnnnnnnnnnnnnnnnnnnnnnnnnnnnnnnnnnnnnnnnnnnnnnnnnnnnnnnnnnnnnnnnnnnnnnnnnnnnnnnnnnnnnnnnnnnnnnnnnnnnnnnnnnnnnnnnnnnnnnnnnnnnnnnnnnnnnnnnnnnnnnnnnnnnnnnnnnnnnnnnnnnnnnnnnnnnnnnnnnnnnnnnnnnnnnnnnnnnnnnnnnnnnnnnnnnnnnnnnnnnnnnnnnnnnnnnnnnnnnnnnnnnnnnnnnnnnnnnnnnnnnnnnnnnnnnnnnnnnnnnnnnnnnnnnnnnnnnnnnnnnnnnnnnnnnnnnnnnnnnnnnnnnnnnnnnnnnnnnnnnnnnnnnnnnnnnnnnnnnnnnnnnnnnnnnnnnnnnnnnnnnnnnnnnnnnnnnnnnnnnnnnnnnnnnnnnnnnnnnnnnnnnnnnnnnnnnnnnnnnnnnnnnnnnnnnnnnnnnnnnnnnnnnnnnnnnnnnnnnnnnnnnnnnnnnnnnnnnnnnnnnnnnnnnnnnnnnnnnnnnnnnnnnnnnnnnnnnnnnnnnnnnnnnnnnnnnnnnnnnnnnnnnnnnnnnnnnnnnnnnnnnnnnnnnnnnnnnnnnnnnnnnnnnnnnnnnnnnnnnnnnnnnnnnnnnnnnnnnnnnnnnnnnnnnnnnnnnnnnnnnnnnnnnnnnnnnnnnnnnnnnnnnnnnnnnnnnnnnnnnnnnnnnnnnnnnnnnnnnnnnnnnnnnnnnnnnnnnnnnnnnnnnnnnnnnnnnnnnnnnnnnnnnnnnnnnnnnnnnnnnnnnnnnnnnnnnnnnnnnnnnnnnnnnnnnnnnnnnnnnnnnnnnnnnnnnnnnnnnnnnnnnnnnnnnnnnnnnnnnnnnnnnnnnnnnnnnnnnnnnnnnnnnnnnnnnnnnnnnnnnnnnnnnnnnnnnnnnnnnnnnnnnnnnnnnnnnnnnnnnnnnnnnnnnnnnnnnnnnnnnnnnnnnnnnnnnnnnnnnnnnnnnnnnnnnnnnnnnnnnnnnnnnnnnnnnnnnnnnnnnnnnnnnnnnnnnnnnnnnnnnnnnnnnnnnnnnnnnnnnnnnnnnnnnnnnnnnnnnnnnnnnnnnnnnnnnnnnnnnnnnnnnnnnnnnnnnnnnnnnnnnnnnnnnnnnnnnnnnnnnnnnnnnnnnnnnnnnnnnnnnnnnnnnnnnnnnnnnnnnnnnnnnnnnnnnnnnnnnnnnnnnnnnnnnnnnnnnnnnnnnnnnnnnnnnnnnnnnnnnnnnnnnnnnnnnnnnnnnnnnnnnnnnnnnnnnnnnnnnnnnnnnnnnnnnnnnnnnnnnnnnnnnnnnnnnnnnnnnnnnnnnnnnnnnnnnnnnnnnnnnnnnnnnnnnnnnnnnnnnnnnnnnnnnnnnnnnnnnnnnnnnnnnnnnnnnnnnnnnnnnnnnnnnnnnnnnnnnnnnnnnnnnnnnnnnnnnnnnnnnnnnnnnnnnnnnnnnnnnnnnnnnnnnnnnnnnnnnnnnnnnnnnnnnnnnnnnnnnnnnnnnnnnnnnnnnnnnnnnnnnnnnnnnnnnnnnnnnnnnnnnnnnnnnnnnnnnnnnnnnnnnnnnnnnnnnnnnnnnnnnnnnnnnnnnnnnnnnnnnnnnnnnnnnnnnnnnnnnnnnnnnnnnnnnnnnnnnnnnnnnnnnnnnnnnnnnnnnnnnnnnnnnnnnnnnnnnnnnnnnnnnnnnnnnnnnnnnnnnnnnnnnnnnnnnnnnnnnnnnnnnnnnnnnnnnnnnnnnnnnnnnnnnnnnnnnnnnnnnnnnnnnnnnnnnnnnnnnnnnnnnnnnnnnnnnnnnnnnnnnnnnnnnnnnnnnnnnnnnnnnnnnnnnnnnnnnnnnnnnnnnnnnnnnnnnnnnnnnnnnnnnnnnnnnnnnnnnnnnnnnnnnnnnnnnnnnnnnnnnnnnnnnnnnnnnnnnnnnnnnnnnnnnnnnnnnnnnnnnnnnnnnnnnnnnnnnnnnnnnnnnnnnnnnnnnnnnnnnnnnnnnnnnnnnnnnnnnnnnnnnnnnnnnnnnnnnnnnnnnnnnnnnnnnnnnnnnnnnnnnnnnnnnnnnnnnnnnnnnnnnnnnnnnnnnnnnnnnnnnnnnnnnnnnnnnnnnnnnnnnnnnnnnnnnnnnnnnnnnnnnnnnnnnnnnnnnnnnnnnnnnnnnnnnnnnnnnnnnnnnnnnnnnnnnnnnnnnnnnnnnnnnnnnnnnnnnnnnnnnnnnnnnnnnnnnnnnnnnnnnnnnnnnnnnnnnnnnnnnnnnnnnnnnnnnnnnnnnnnnnnnnnnnnnnnnnnnnnnnnnnnnnnnnnnnnnnnnnnnnnnnnnnnnnnnnnnnnnnnnnnnnnnnnnnnnnnnnnnnnnnnnnnnnnnnnnnnnnnnnnnnnnnnnnnnnnnnnnnnnnnnnnnnnnnnnnnnnnnnnnnnnnnnnnnnnnnnnnnnnnnnnnnnnnnnnnnnnnnnnnnnnnnnnnnnnnnnnnnnnnnnnnnnnnnnnnnnnnnnnnnnnnnnnnnnnnnnnnnnnnnnnnnnnnnnnnnnnnnnnnnnnnnnnnnnnnnnnnnnnnnnnnnnnnnnnnnnnnnnnnnnnnnnnnnnnnnnnnnnnnnnnnnnnnnnnnnnnnnnnnnnnnnnnnnnnnnnnnnnnnnnnnnnnnnnnnnnnnnnnnnnnnnnnnnnnnnnnnnnnnnnnnnnnnnnnnnnnnnnnnnnnnnnnnnnnnnnnnnnnnnnnnnnnnnnnnnnnnnnnnnnnnnnnnnnnnnnnnnnnnnnnnnnnnnnnnnnnnnnnnnnnnnnnnnnnnnnnnnnnnnnnnnnnnnnnnnnnnnnnnnnnnnnnnnnnnnnnnnnnnnnnnnnnnnnnnnnnnnnnnnnnnnnnnnnnnnnnnnnnnnnnnnnnnnnnnnnnnnnnnnnnnnnnnnnnnnnnnnnnnnnnnnnnnnnnnnnnnnnnnnnnnnnnnnnnnnnnnnnnnnnnnnnnnnnnnnnnnnnnnnnnnnnnnnnnnnnnnnnnnnnnnnnnnnnnnnnnnnnnnnnnnnnnnnnnnnnnnnnnnnnnnnnnnnnnnnnnnnnnnnnnnnnnnnnnnnnnnnnnnnnnnnnnnnnnnnnnnnnnnnnnnnnnnnnnnnnnnnnnnnnnnnnnnnnnnnnnnnnnnnnnnnnnnnnnnnnnnnnnnnnnnnnnnnnnnnnnnnnnnnnnnnnnnnnnnnnnnnnnnnnnnnnnnnnnnnnnnnnnnnnnnnnnnnnnnnnnnnnnnnnnnnnnnnnnnnnnnnnnnnnnnnnnnnnnnnnnnnnnnnnnnnnnnnnnnnnnnnnnnnnnnnnnnnnnnnnnnnnnnnnnnnnnnnnnnnnnnnnnnnnnnnnnnnnnnnnnnnnnnnnnnnnnnnnnnnnnnnnnnnnnnnnnnnnnnnnnnnnnnnnnnnnnnnnnnnnnnnnnnnnnnnnnnnnnnnnnnnnnnnnnnnnnnnnnnnnnnnnnnnnnnnnnnnnnnnnnnnnnnnnnnnnnnnnnnnnnnnnnnnnnnnnnnnnnnnnnnnnnnnnnnnnnnnnnnnnnnnnnnnnnnnnnnnnnnnnnnnnnnnnnnnnnnnnnnnnnnnnnnnnnnnnnnnnnnnnnnnnnnnnnnnnnnnnnnnnnnnnnnnnnnnnnnnnnnnnnnnnnnnnnnnnnnnnnnnnnnnnnnnnnnnnnnnnnnnnnnnnnnnnnnnnnnnnnnnnnnnnnnnnnnnnnnnnnnnnnnnnnnnnnnnnnnnnnnnnnnnnnnnnnnnnnnnnnnnnnnnnnnnnnnnnnnnnnnnnnnnnnnnnnnnnnnnnnnnnnnnnnnnnnnnnnnnnnnnnnnnnnnnnnnnnnnnnnnnnnnnnnnnnnnnnnnnnnnnnnnnnnnnnnnnnnnnnnnnnnnnnnnnnnnnnnnnnnnnnnnnnnnnnnnnnnnnnnnnnnnnnnnnnnnnnnnnnnnnnnnnnnnnnnnnnnnnnnnnnnnnnnnnnnnnnnnnnnnnnnnnnnnnnnnnnnnnnnnnnnnnnnnnnnnnnnnnnnnnnnnnnnnnnnnnnnnnnnnnnnnnnnnnnnnnnnnnnnnnnnnnnnnnnnnnnnnnnnnnnnnnnnnnnnnnnnnnnnnnnnnnnnnnnnnnnnnnnnnnnnnnnnnnnnnnnnnnnnnnnnnnnnnnnnnnnnnnnnnnnnnnnnnnnnnnnnnnnnnnnnnnnnnnnnnnnnnnnnnnnnnnnnnnnnnnnnnnnnnnnnnnnnnnnnnnnnnnnnnnnnnnnnnnnnnnnnnnnnnnnnnnnnnnnnnnnnnnnnnnnnnnnnnnnnnnnnnnnnnnnnnnnnnnnnnnnnnnnnnnnnnnnnnnnnnnnnnnnnnnnnnnnnnnnnnnnnnnnnnnnnnnnnnnnnnnnnnnnnnnnnnnnnnnnnnnnnnnnnnnnnnnnnnnnnnnnnnnnnnnnnnnnnnnnnnnnnnnnnnnnnnnnnnnnnnnnnnnnnnnnnnnnnnnnnnnnnnnnnnnnnnnnnnnnnnnnnnnnnnnnnnnnnnnnnnnnnnnnnnnnnnnnnnnnnnnnnnnnnnnnnnnnnnnnnnnnnnnnnnnnnnnnnnnnnnnnnnnnnnnnnnnnnnnnnnnnnnnnnnnnnnnnnnnnnnnnnnnnnnnnnnnnnnnnnnnnnnnnnnnnnnnnnnnnnnnnnnnnnnnnnnnnnnnnnnnnnnnnnnnnnnnnnnnnnnnnnnnnnnnnnnnnnnnnnnnnnnnnnnnnnnnnnnnnnnnnnnnnnnnnnnnnnnnnnnnnnnnnnnnnnnnnnnnnnnnnnnnnnnnnnnnnnnnnnnnnnnnnnnnnnnnnnnnnnnnnnnnnnnnnnnnnnnnnnnnnnnnnnnnnnnnnnnnnnnnnnnnnnnnnnnnnnnnnnnnnnnnnnnnnnnnnnnnnnnnnnnnnnnnnnnnnnnnnnnnnnnnnnnnnnnnnnnnnnnnnnnnnnnnnnnnnnnnnnnnnnnnnnnnnnnnnnnnnnnnnnnnnnnnnnnnnnnnnnnnnnnnnnnnnnnnnnnnnnnnnnnnnnnnnnnnnnnnnnnnnnnnnnnnnnnnnnnnnnnnnnnnnnnnnnnnnnnnnnnnnnnnnnnnnnnnnnnnnnnnnnnnnnnnnnnnnnnnnnnnnnnnnnnnnnnnnnnnnnnnnnnnnnnnnnnnnnnnnnnnnnnnnnnnnnnnnnnnnnnnnnnnnnnnnnnnnnnnnnnnnnnnnnnnnnnnnnnnnnnnnnnnnnnnnnnnnnnnnnnnnnnnnnnnnnnnnnnnnnnnnnnnnnnnnnnnnnnnnnnnnnnnnnnnnnnnnnnnnnnnnnnnnnnnnnnnnnnnnnnnnnnnnnnnnnnnnnnnnnnnnnnnnnnnnnnnnnnnnnnnnnnnnnnnnnnnnnnnnnnnnnnnnnnnnnnnnnnnnnnnnnnnnnnnnnnnnnnnnnnnnnnnnnnnnnnnnnnnnnnnnnnnnnnnnnnnnnnnnnnnnnnnnnnnnnnnnnnnnnnnnnnnnnnnnnnnnnnnnnnnnnnnnnnnnnnnnnnnnnnnnnnnnnnnnnnnnnnnnnnnnnnnnnnnnnnnnnnnnnnnnnnnnnnnnnnnnnnnnnnnnnnnnnnnnnnnnnnnnnnnnnnnnnnnnnnnnnnnnnnnnnnnnnnnnnnnnnnnnnnnnnnnnnnnnnnnnnnnnnnnnnnnnnnnnnnnnnnnnnnnnnnnnnnnnnnnnnnnnnnnnnnnnnnnnnnnnnnnnnnnnnnnnnnnnnnnnnnnnnnnnnnnnnnnnnnnnnnnnnnnnnnnnnnnnnnnnnnnnnnnnnnnnnnnnnnnnnnnnnnnnnnnnnnnnnnnnnnnnnnnnnnnnnnnnnnnnnnnnnnnnnnnnnnnnnnnnnnnnnnnnnnnnnnnnnnnnnnnnnnnnnnnnnnnnnnnnnnnnnnnnnnnnnnnnnnnnnnnnnnnnnnnnnnnnnnnnnnnnnnnnnnnnnnnnnnnnnnnnnnnnnnnnnnnnnnnnnnnnnnnnnnnnnnnnnnnnnnnnnnnnnnnnnnnnnnnnnnnnnnnnnnnnnnnnnnnnnnnnnnnnnnnnnnnnnnnnnnnnnnnnnnnnnnnnnnnnnnnnnnnnnnnnnnnnnnnnnnnnnnnnnnnnnnnnnnnnnnnnnnnnnnnnnnnnnnnnnnnnnnnnnnnnnnnnnnnnnnnnnnnnnnnnnnnnnnnnnnnnnnnnnnnnnnnnnnnnnnnnnnnnnnnnnnnnnnnnnnnnnnnnnnnnnnnnnnnnnnnnnnnnnnnnnnnnnnnnnnnnnnnnnnnnnnnnnnnnnnnnnnnnnnnnnnnnnnnnnnnnnnnnnnnnnnnnnnnnnnnnnnnnnnnnnnnnnnnnnnnnnnnnnnnnnnnnnnnnnnnnnnnnnnnnnnnnnnnnnnnnnnnnnnnnnnnnnnnnnnnnnnnnnnnnnnnnnnnnnnnnnnnnnnnnnnnnnnnnnnnnnnnnnnnnnnnnnnnnnnnnnnnnnnnnnnnnnnnnnnnnnnnnnnnnnnnnnnnnnnnnnnnnnnnnnnnnnnnnnnnnnnnnnnnnnnnnnnnnnnnnnnnnnnnnnnnnnnnnnnnnnnnnnnnnnnnnnnnnnnnnnnnnnnnnnnnnnnnnnnnnnnnnnnnnnnnnnnnnnnnnnnnnnnnnnnnnnnnnnnnnnnnnnnnnnnnnnnnnnnnnnnnnnnnnnnnnnnnnnnnnnnnnnnnnnnnnnnnnnnnnnnnnnnnnnnnnnnnnnnnnnnnnnnnnnnnnnnnnnnnnnnnnnnnnnnnnnnnnnnnnnnnnnnnnnnnnnnnnnnnnnnnnnnnnnnnnnnnnnnnnnnnnnnnnnnnnnnnnnnnnnnnnnnnnnnnnnnnnnnnnnnnnnnnnnnnnnnnnnnnnnnnnnnnnnnnnnnnnnnnnnnnnnnnnnnnnnnnnnnnnnnnnnnnnnnnnnnnnnnnnnnnnnnnnnnnnnnnnnnnnnnnnnnnnnnnnnnnnnnnnnnnnnnnnnnnnnnnnnnnnnnnnnnnnnnnnnnnnnnnnnnnnnnnnnnnnnnnnnnnnnnnnnnnnnnnnnnnnnnnnnnnnnnnnnnnnnnnnnnnnnnnnnnnnnnnnnnnnnnnnnnnnnnnnnnnnnnnnnnnnnnnnnnnnnnnnnnnnnnnnnnnnnnnnnnnnnnnnnnnnnnnnnnnnnnnnnnnnnnnnnnnnnnnnnnnnnnnnnnnnnnnnnnnnnnnnnnnnnnnnnnnnnnnnnnnnnnnnnnnnnnnnnnnnnnnnnnnnnnnnnnnnnnnnnnnnnnnnnnnnnnnnnnnnnnnnnnnnnnnnnnnnnnnnnnnnnnnnnnnnnnnnnnnnnnnnnnnnnnnnnnnnnnnnnnnnnnnnnnnnnnnnnnnnnnnnnnnnnnnnnnnnnnnnnnnnnnnnnnnnnnnnnnnnnnnnnnnnnnnnnnnnnnnnnnnnnnnnnnnnnnnnnnnnnnnnnnnnnnnnnnnnnnnnnnnnnnnnnnnnnnnnnnnnnnnnnnnnnnnnnnnnnnnnnnnnnnnnnnnnnnnnnnnnnnnnnnnnnnnnnnnnnnnnnnnnnnnnnnnnnnnnnnnnnnnnnnnnnnnnnnnnnnnnnnnnnnnnnnnnnnnnnnnnnnnnnnnnnnnnnnnnnnnnnnnnnnnnnnnnnnnnnnnnnnnnnnnnnnnnnnnnnnnnnnnnnnnnnnnnnnnnnnnnnnnnnnnnnnnnnnnnnnnnnnnnnnnnnnnnnnnnnnnnnnnnnnnnnnnnnnnnnnnnnnnnnnnnnnnnnnnnnnnnnnnnnnnnnnnnnnnnnnnnnnnnnnnnnnnnnnnnnnnnnnnnnnnnnnnnnnnnnnnnnnnnnnnnnnnnnnnnnnnnnnnnnnnnnnnnnnnnnnnnnnnnnnnnnnnnnnnnnnnnnnnnnnnnnnnnnnnnnnnnnnnnnnnnnnnnnnnnnnnnnnnnnnnnnnnnnnnnnnnnnnnnnnnnnnnnnnnnnnnnnnnnnnnnnnnnnnnnnnnnnnnnnnnnnnnnnnnnnnnnnnnnnnnnnnnnnnnnnnnnnnnnnnnnnnnnnnnnnnnnnnnnnnnnnnnnnnnnnnnnnnnnnnnnnnnnnnnnnnnnnnnnnnnnnnnnnnnnnnnnnnnnnnnnnnnnnnnnnnnnnnnnnnnnnnnnnnnnnnnnnnnnnnnnnnnnnnnnnnnnnnnnnnnnnnnnnnnnnnnnnnnnnnnnnnnnnnnnnnnnnnnnnnnnnnnnnnnnnnnnnnnnnnnnnnnnnnnnnnnnnnnnnnnnnnnnnnnnnnnnnnnnnnnnnnnnnnnnnnnnnnnnnnnnnnnnnnnnnnnnnnnnnnnnnnnnnnnnnnnnnnnnnnnnnnnnnnnnnnnnnnnnnnnnnnnnnnnnnnnnnnnnnnnnnnnnnnnnnnnnnnnnnnnnnnnnnnnnnnnnnnnnnnnnnnnnnnnnnnnnnnnnnnnnnnnnnnnnnnnnnnnnnnnnnnnnnnnnnnnnnnnnnnnnnnnnnnnnnnnnnnnnnnnnnnnnnnnnnnnnnnnnnnnnnnnnnnnnnnnnnnnnnnnnnnnnnnnnnnnnnnnnnnnnnnnnnnnnnnnnnnnnnnnnnnnnnnnnnnnnnnnnnnnnnnnnnnnnnnnnnnnnnnnnnnnnnnnnnnnnnnnnnnnnnnnnnnnnnnnnnnnnnnnnnnnnnnnnnnnnnnnnnnnnnnnnnnnnnnnnnnnnnnnnnnnnnnnnnnnnnnnnnnnnnnnnnnnnnnnnnnnnnnnnnnnnnnnnnnnnnnnnnnnnnnnnnnnnnnnnnnnnnnnnnnnnnnnnnnnnnnnnnnnnnnnnnnnnnnnnnnnnnnnnnnnnnnnnnnnnnnnnnnnnnnnnnnnnnnnnnnnnnnnnnnnnnnnnnnnnnnnnnnnnnnnnnnnnnnnnnnnnnnnnnnnnnnnnnnnnnnnnnnnnnnnnnnnnnnnnnnnnnnnnnnnnnnnnnnnnnnnnnnnnnnnnnnnnnnnnnnnnnnnnnnnnnnnnnnnnnnnnnnnnnnnnnnnnnnnnnnnnnnnnnnnnnnnnnnnnnnnnnnnnnnnnnnnnnnnnnnnnnnnnnnnnnnnnnnnnnnnnnnnnnnnnnnnnnnnnnnnnnnnnnnnnnnnnnnnnnnnnnnnnnnnnnnnnnnnnnnnnnnnnnnnnnnnnnnnnnnnnnnnnnnnnnnnnnnnnnnnnnnnnnnnnnnnnnnnnnnnnnnnnnnnnnnnnnnnnnnnnnnnnnnnnnnnnnnnnnnnnnnnnnnnnnnnnnnnnnnnnnnnnnnnnnnnnnnnnnnnnnnnnnnnnnnnnnnnnnnnnnnnnnnnnnnnnnnnnnnnnnnnnnnnnnnnnnnnnnnnnnnnnnnnnnnnnnnnnnnnnnnnnnnnnnnnnnnnnnnnnnnnnnnnnnnnnnnnnnnnnnnnnnnnnnnnnnnnnnnnnnnnnnnnnnnnnnnnnnnnnnnnnnnnnnnnnnnnnnnnnnnnnnnnnnnnnnnnnnnnnnnnnnnnnnnnnnnnnnnnnnnnnnnnnnnnnnnnnnnnnnnnnnnnnnnnnnnnnnnnnnnnnnnnnnnnnnnnnnnnnnnnnnnnnnnnnnnnnnnnnnnnnnnnnnnnnnnnnnnnnnnnnnnnnnnnnnnnnnnnnnnnnnnnnnnnnnnnnnnnnnnnnnnnnnnnnnnnnnnnnnnnnnnnnnnnnnnnnnnnnnnnnnnnnnnnnnnnnnnnnnnnnnnnnnnnnnnnnnnnnnnnnnnnnnnnnnnnnnnnnnnnnnnnnnnnnnnnnnnnnnnnnnnnnnnnnnnnnnnnnnnnnnnnnnnnnnnnnnnnnnnnnnnnnnnnnnnnnnnnnnnnnnnnnnnnnnnnnnnnnnnnnnnnnnnnnnnnnnnnnnnnnnnnnnnnnnnnnnnnnnnnnnnnnnnnnnnnnnnnnnnnnnnnnnnnnnnnnnnnnnnnnnnnnnnnnnnnnnnnnnnnnnnnnnnnnnnnnnnnnnnnnnnnnnnnnnnnnnnnnnnnnnnnnnnnnnnnnnnnnnnnnnnnnnnnnnnnnnnnnnnnnnnnnnnnnnnnnnnnnnnnnnnnnnnnnnnnnnnnnnnnnnnnnnnnnnnnnnnnnnnnnnnnnnnnnnnnnnnnnnnnnnnnnnnnnnnnnnnnnnnnnnnnnnnnnnnnnnnnnnnnnnnnnnnnnnnnnnnnnnnnnnnnnnnnnnnnnnnnnnnnnnnnnnnnnnnnnnnnnnnnnnnnnnnnnnnnnnnnnnnnnnnnnnnnnnnnnnnnnnnnnnnnnnnnnnnnnnnnnnnnnnnnnnnnnnnnnnnnnnnnnnnnnnnnnnnnnnnnnnnnnnnnnnnnnnnnnnnnnnnnnnnnnnnnnnnnnnnnnnnnnnnnnnnnnnnnnnnnnnnnnnnnnnnnnnnnnnnnnnnnnnnnnnnnnnnnnnnnnnnnnnnnnnnnnnnnnnnnnnnnnnnnnnnnnnnnnnnnnnnnnnnnnnnnnnnnnnnnnnnnnnnnnnnnnnnnnnnnnnnnnnnnnnnnnnnnnnnnnnnnnnnnnnnnnnnnnnnnnnnnnnnnnnnnnnnnnnnnnnnnnnnnnnnnnnnnnnnnnnnnnnnnnnnnnnnnnnnnnnnnnnnnnnnnnnnnnnnnnnnnnnnnnnnnnnnnnnnnnnnnnnnnnnnnnnnnnnnnnnnnnnnnnnnnnnnnnnnnnnnnnnnnnnnnnnnnnnnnnnnnnnnnnnnnnnnnnnnnnnnnnnnnnnnnnnnnnnnnnnnnnnnnnnnnnnnnnnnnnnnnnnnnnnnnnnnnnnnnnnnnnnnnnnnnnnnnnnnnnnnnnnnnnnnnnnnnnnnnnnnnnnnnnnnnnnnnnnnnnnnnnnnnnnnnnnnnnnnnnnnnnnnnnnnnnnnnnnnnnnnnnnnnnnnnnnnnnnnnnnnnnnnnnnnnnnnnnnnnnnnnnnnnnnnnnnnnnnnnnnnnnnnnnnnnnnnnnnnnnnnnnnnnnnnnnnnnnnnnnnnnnnnnnnnnnnnnnnnnnnnnnnnnnnnnnnnnnnnnnnnnnnnnnnnnnnnnnnnnnnnnnnnnnnnnnnnnnnnnnnnnnnnnnnnnnnnnnnnnnnnnnnnnnnnnnnnnnnnnnnnnnnnnnnnnnnnnnnnnnnnnnnnnnnnnnnnnnnnnnnnnnnnnnnnnnnnnnnnnnnnnnnnnnnnnnnnnnnnnnnnnnnnnnnnnnnnnnnnnnnnnnnnnnnnnnnnnnnnnnnnnnnnnnnnnnnnnnnnnnnnnnnnnnnnnnnnnnnnnnnnnnnnnnnnnnnnnnnnnnnnnnnnnnnnnnnnnnnnnnnnnnnnnnnnnnnnnnnnnnnnnnnnnnnnnnnnnnnnnnnnnnnnnnnnnnnnnnnnnnnnnnnnnnnnnnnnnnnnnnnnnnnnnnnnnnnnnnnnnnnnnnnnnnnnnnnnnnnnnnnnnnnnnnnnnnnnnnnnnnnnnnnnnnnnnnnnnnnnnnnnnnnnnnnnnnnnnnnnnnnnnnnnnnnnnnnnnnnnnnnnnnnnnnnnnnnnnnnnnnnnnnnnnnnnnnnnnnnnnnnnnnnnnnnnnnnnnnnnnnnnnnnnnnnnnnnnnnnnnnnnnnnnnnnnnnnnnnnnnnnnnnnnnnnnnnnnnnnnnnnnnnnnnnnnnnnnnnnnnnnnnnnnnnnnnnnnnnnnnnnnnnnnnnnnnnnnnnnnnnnnnnnnnnnnnnnnnnnnnnnnnnnnnnnnnnnnnnnnnnnnnnnnnnnnnnnnnnnnnnnnnnnnnnnnnnnnnnnnnnnnnnnnnnnnnnnnnnnnnnnnnnnnnnnnnnnnnnnnnnnnnnnnnnnnnnnnnnnnnnnnnnnnnnnnnnnnnnnnnnnnnnnnnnnnnnnnnnnnnnnnnnnnnnnnnnnnnnnnnnnnnnnnnnnnnnnnnnnnnnnnnnnnnnnnnnnnnnnnnnnnnnnnnnnnnnnnnnnnnnnnnnnnnnnnnnnnnnnnnnnnnnnnnnnnnnnnnnnnnnnnnnnnnnnnnnnnnnnnnnnnnnnnnnnnnnnnnnnnnnnnnnnnnnnnnnnnnnnnnnnnnnnnnnnnnnnnnnnnnnnnnnnnnnnnnnnnnnnnnnnnnnnnnnnnnnnnnnnnnnnnnnnnnnnnnnnnnnnnnnnnnnnnnnnnnnnnnnnnnnnnnnnnnnnnnnnnnnnnnnnnnnnnnnnnnnnnnnnnnnnnnnnnnnnnnnnnnnnnnnnnnnnnnnnnnnnnnnnnnnnnnnnnnnnnnnnnnnnnnnnnnnnnnnnnnnnnnnnnnnnnnnnnnnnnnnnnnnnnnnnnnnnnnnnnnnnnnnnnnnnnnnnnnnnnnnnnnnnnnnnnnnnnnnnnnnnnnnnnnnnnnnnnnnnnnnnnnnnnnnnnnnnnnnnnnnnnnnnnnnnnnnnnnnnnnnnnnnnnnnnnnnnnnnnnnnnnnnnnnnnnnnnnnnnnnnnnnnnnnnnnnnnnnnnnnnnnnnnnnnnnnnnnnnnnnnnnnnnnnnnnnnnnnnnnnnnnnnnnnnnnnnnnnnnnnnnnnnnnnnnnnnnnnnnnnnnnnnnnnnnnnnnnnnnnnnnnnnnnnnnnnnnnnnnnnnnnnnnnnnnnnnnnnnnnnnnnnnnnnnnnnnnnnnnnnnnnnnnnnnnnnnnnnnnnnnnnnnnnnnnnnnnnnnnnnnnnnnnnnnnnnnnnnnnnnnnnnnnnnnnnnnnnnnnnnnnnnnnnnnnnnnnnnnnnnnnnnnnnnnnnnnnnnnnnnnnnnnnnnnnnnnnnnnnnnnnnnnnnnnnnnnnnnnnnnnnnnnnnnnnnnnnnnnnnnnnnnnnnnnnnnnnnnnnnnnnnnnnnnnnnnnnnnnnnnnnnnnnnnnnnnnnnnnnnnnnnnnnnnnnnnnnnnnnnnnnnnnnnnnnnnnnnnnnnnnnnnnnnnnnnnnnnnnnnnnnnnnnnnnnnnnnnnnnnnnnnnnnnnnnnnnnnnnnnnnnnnnnnnnnnnnnnnnnnnnnnnnnnnnnnnnnnnnnnnnnnnnnnnnnnnnnnnnnnnnnnnnnnnnnnnnnnnnnnnnnnnnnnnnnnnnnnnnnnnnnnnnnnnnnnnnnnnnnnnnnnnnnnnnnnnnnnnnnnnnnnnnnnnnnnnnnnnnnnnnnnnnnnnnnnnnnnnnnnnnnnnnnnnnnnnnnnnnnnnnnnnnnnnnnnnnnnnnnnnnnnnnnnnnnnnnnnnnnnnnnnnnnnnnnnnnnnnnnnnnnnnnnnnnnnnnnnnnnnnnnnnnnnnnnnnnnnnnnnnnnnnnnnnnnnnnnnnnnnnnnnnnnnnnnnnnnnnnnnnnnnnnnnnnnnnnnnnnnnnnnnnnnnnnnnnnnnnnnnnnnnnnnnnnnnnnnnnnnnnnnnnnnnnnnnnnnnnnnnnnnnnnnnnnnnnnnnnnnnnnnnnnnnnnnnnnnnnnnnnnnnnnnnnnnnnnnnnnnnnnnnnnnnnnnnnnnnnnnnnnnnnnnnnnnnnnnnnnnnnnnnnnnnnnnnnnnnnnnnnnnnnnnnnnnnnnnnnnnnnnnnnnnnnnnnnnnnnnnnnnnnnnnnnnnnnnnnnnnnnnnnnnnnnnnnnnnnnnnnnnnnnnnnnnnnnnnnnnnnnnnnnnnnnnnnnnnnnnnnnnnnnnnnnnnnnnnnnnnnnnnnnnnnnnnnnnnnnnnnnnnnnnnnnnnnnnnnnnnnnnnnnnnnnnnnnnnnnnnnnnnnnnnnnnnnnnnnnnnnnnnnnnnnnnnnnnnnnnnnnnnnnnnnnnnnnnnnnnnnnnnnnnnnnnnnnnnnnnnnnnnnnnnnnnnnnnnnnnnnnnnnnnnnnnnnnnnnnnnnnnnnnnnnnnnnnnnnnnnnnnnnnnnnnnnnnnnnnnnnnnnnnnnnnnnnnnnnnnnnnnnnnnnnnnnnnnnnnnnnnnnnnnnnnnnnnnnnnnnnnnnnnnnnnnnnnnnnnnnnnnnnnnnnnnnnnnnnnnnnnnnnnnnnnnnnnnnnnnnnnnnnnnnnnnnnnnnnnnnnnnnnnnnnnnnnnnnnnnnnnnnnnnnnnnnnnnnnnnnnnnnnnnnnnnnnnnnnnnnnnnnnnnnnnnnnnnnnnnnnnnnnnnnnnnnnnnnnnnnnnnnnnnnnnnnnnnnnnnnnnnnnnnnnnnnnnnnnnnnnnnnnnnnnnnnnnnnnnnnnnnnnnnnnnnnnnnnnnnnnnnnnnnnnnnnnnnnnnnnnnnnnnnnnnnnnnnnnnnnnnnnnnnnnnnnnnnnnnnnnnnnnnnnnnnnnnnnnnnnnnnnnnnnnnnnnnnnnnnnnnnnnnnnnnnnnnnnnnnnnnnnnnnnnnnnnnnnnnnnnnnnnnnnnnnnnnnnnnnnnnnnnnnnnnnnnnnnnnnnnnnnnnnnnnnnnnnnnnnnnnnnnnnnnnnnnnnnnnnnnnnnnnnnnnnnnnnnnnnnnnnnnnnnnnnnnnnnnnnnnnnnnnnnnnnnnnnnnnnnnnnnnnnnnnnnnnnnnnnnnnnnnnnnnnnnnnnnnnnnnnnnnnnnnnnnnnnnnnnnnnnnnnnnnnnnnnnnnnnnnnnnnnnnnnnnnnnnnnnnnnnnnnnnnnnnnnnnnnnnnnnnnnnnnnnnnnnnnnnnnnnnnnnnnnnnnnnnnnnnnnnnnnnnnnnnnnnnnnnnnnnnnnnnnnnnnnnnnnnnnnnnnnnnnnnnnnnnnnnnnnnnnnnnnnnnnnnnnnnnnnnnnnnnnnnnnnnnnnnnnnnnnnnnnnnnnnnnnnnnnnnnnnnnnnnnnnnnnnnnnnnnnnnnnnnnnnnnnnnnnnnnnnnnnnnnnnnnnnnnnnnnnnnnnnnnnnnnnnnnnnnnnnnnnnnnnnnnnnnnnnnnnnnnnnnnnnnnnnnnnnnnnnnnnnnnnnnnnnnnnnnnnnnnnnnnnnnnnnnnnnnnnnnnnnnnnnnnnnnnnnnnnnnnnnnnnnnnnnnnnnnnnnnnnnnnnnnnnnnnnnnnnnnnnnnnnnnnnnnnnnnnnnnnnnnnnnnnnnnnnnnnnnnnnnnnnnnnnnnnnnnnnnnnnnnnnnnnnnnnnnnnnnnnnnnnnnnnnnnnnnnnnnnnnnnnnnnnnnnnnnnnnnnnnnnnnnnnnnnnnnnnnnnnnnnnnnnnnnnnnnnnnnnnnnnnnnnnnnnnnnnnnnnnnnnnnnnnnnnnnnnnnnnnnnnnnnnnnnnnnnnnnnnnnnnnnnnnnnnnnnnnnnnnnnnnnnnnnnnnnnnnnnnnnnnnnnnnnnnnnnnnnnnnnnnnnnnnnnnnnnnnnnnnnnnnnnnnnnnnnnnnnnnnnnnnnnnnnnnnnnnnnnnnnnnnnnnnnnnnnnnnnnnnnnnnnnnnnnnnnnnnnnnnnnnnnnnnnnnnnnnnnnnnnnnnnnnnnnnnnnnnnnnnnnnnnnnnnnnnnnnnnnnnnnnnnnnnnnnnnnnnnnnnnnnnnnnnnnnnnnnnnnnnnnnnnnnnnnnnnnnnnnnnnnnnnnnnnnnnnnnnnnnnnnnnnnnnnnnnnnnnnnnnnnnnnnnnnnnnnnnnnnnnnnnnnnnnnnnnnnnnnnnnnnnnnnnnnnnnnnnnnnnnnnnnnnnnnnnnnnnnnnnnnnnnnnnnnnnnnnnnnnnnnnnnnnnnnnnnnnnnnnnnnnnnnnnnnnnnnnnnnnnnnnnnnnnnnnnnnnnnnnnnnnnnnnnnnnnnnnnnnnnnnnnnnnnnnnnnnnnnnnnnnnnnnnnnnnnnnnnnnnnnnnnnnnnnnnnnnnnnnnnnnnnnnnnnnnnnnnnnnnnnnnnnnnnnnnnnnnnnnnnnnnnnnnnnnnnnnnnnnnnnnnnnnnnnnnnnnnnnnnnnnnnnnnnnnnnnnnnnnnnnnnnnnnnnnnnnnnnnnnnnnnnnnnnnnnnnnnnnnnnnnnnnnnnnnnnnnnnnnnnnnnnnnnnnnnnnnnnnnnnnnnnnnnnnnnnnnnnnnnnnnnnnnnnnnnnnnnnnnnnnnnnnnnnnnnnnnnnnnnnnnnnnnnnnnnnnnnnnnnnnnnnnnnnnnnnnnnnnnnnnnnnnnnnnnnnnnnnnnnnnnnnnnnnnnnnnnnnnnnnnnnnnnnnnnnnnnnnnnnnnnnnnnnnnnnnnnnnnnnnnnnnnnnnnnnnnnnnnnnnnnnnnnnnnnnnnnnnnnnnnnnnnnnnnnnnnnnnnnnnnnnnnnnnnnnnnnnnnnnnnnnnnnnnnnnnnnnnnnnnnnnnnnnnnnnnnnnnnnnnnnnnnnnnnnnnnnnnnnnnnnnnnnnnnnnnnnnnnnnnnnnnnnnnnnnnnnnnnnnnnnnnnnnnnnnnnnnnnnnnnnnnnnnnnnnnnnnnnnnnnnnnnnnnnnnnnnnnnnnnnnnnnnnnnnnnnnnnnnnnnnnnnnnnnnnnnnnnnnnnnnnnnnnnnnnnnnnnnnnnnnnnnnnnnnnnnnnnnnnnnnnnnnnnnnnnnnnnnnnnnnnnnnnnnnnnnnnnnnnnnnnnnnnnnnnnnnnnnnnnnnnnnnnnnnnnnnnnnnnnnnnnnnnnnnnnnnnnnnnnnnnnnnnnnnnnnnnnnnnnnnnnnnnnnnnnnnnnnnnnnnnnnnnnnnnnnnnnnnnnnnnnnnnnnnnnnnnnnnnnnnnnnnnnnnnnnnnnnnnnnnnnnnnnnnnnnnnnnnnnnnnnnnnnnnnnnnnnnnnnnnnnnnnnnnnnnnnnnnnnnnnnnnnnnnnnnnnnnnnnnnnnnnnnnnnnnnnnnnnnnnnnnnnnnnnnnnnnnnnnnnnnnnnnnnnnnnnnnnnnnnnnnnnnnnnnnnnnnnnnnnnnnnnnnnnnnnnnnnnnnnnnnnnnnnnnnnnnnnnnnnnnnnnnnnnnnnnnnnnnnnnnnnnnnnnnnnnnnnnnnnnnnnnnnnnnnnnnnnnnnnnnnnnnnnnnnnnnnnnnnnnnnnnnnnnnnnnnnnnnnnnnnnnnnnnnnnnnnnnnnnnnnnnnnnnnnnnnnnnnnnnnnnnnnnnnnnnnnnnnnnnnnnnnnnnnnnnnnnnnnnnnnnnnnnnnnnnnnnnnnnnnnnnnnnnnnnnnnnnnnnnnnnnnnnnnnnnnnnnnnnnnnnnnnnnnnnnnnnnnnnnnnnnnnnnnnnnnnnnnnnnnnnnnnnnnnnnnnnnnnnnnnnnnnnnnnnnnnnnnnnnnnnnnnnnnnnnnnnnnnnnnnnnnnnnnnnnnnnnnnnnnnnnnnnnnnnnnnnnnnnnnnnnnnnnnnnnnnnnnnnnnnnnnnnnnnnnnnnnnnnnnnnnnnnnnnnnnnnnnnnnnnnnnnnnnnnnnnnnnnnnnnnnnnnnnnnnnnnnnnnnnnnnnnnnnnnnnnnnnnnnnnnnnnnnnnnnnnnnnnnnnnnnnnnnnnnnnnnnnnnnnnnnnnnnnnnnnnnnnnnnnnnnnnnnnnnnnnnnnnnnnnnnnnnnnnnnnnnnnnnnnnnnnnnnnnnnnnnnnnnnnnnnnnnnnnnnnnnnnnnnnnnnnnnnnnnnnnnnnnnnnnnnnnnnnnnnnnnnnnnnnnnnnnnnnnnnnnnnnnnnnnnnnnnnnnnnnnnnnnnnnnnnnnnnnnnnnnnnnnnnnnnnnnnnnnnnnnnnnnnnnnnnnnnnnnnnnnnnnnnnnnnnnnnnnnnnnnnnnnnnnnnnnnnnnnnnnnnnnnnnnnnnnnnnnnnnnnnnnnnnnnnnnnnnnnnnnnnnnnnnnnnnnnnnnnnnnnnnnnnnnnnnnnnnnnnnnnnnnnnnnnnnnnnnnnnnnnnnnnnnnnnnnnnnnnnnnnnnnnnnnnnnnnnnnnnnnnnnnnnnnnnnnnnnnnnnnnnnnnnnnnnnnnnnnnnnnnnnnnnnnnnnnnnnnnnnnnnnnnnnnnnnnnnnnnnnnnnnnnnnnnnnnnnnnnnnnnnnnnnnnnnnnnnnnnnnnnnnnnnnnnnnnnnnnnnnnnnnnnnnnnnnnnnnnnnnnnnnnnnnnnnnnnnnnnnnnnnnnnnnnnnnnnnnnnnnnnnnnnnnnnnnnnnnnnnnnnnnnnnnnnnnnnnnnnnnnnnnnnnnnnnnnnnnnnnnnnnnnnnnnnnnnnnnnnnnnnnnnnnnnnnnnnnnnnnnnnnnnnnnnnnnnnnnnnnnnnnnnnnnnnnnnnnnnnnnnnnnnnnnnnnnnnnnnnnnnnnnnnnnnnnnnnnnnnnnnnnnnnnnnnnnnnnnnnnnnnnnnnnnnnnnnnnnnnnnnnnnnnnnnnnnnnnnnnnnnnnnnnnnnnnnnnnnnnnnnnnnnnnnnnnnnnnnnnnnnnnnnnnnnnnnnnnnnnnnnnnnnnnnnnnnnnnnnnnnnnnnnnnnnnnnnnnnnnnnnnnnnnnnnnnnnnnnnnnnnnnnnnnnnnnnnnnnnnnnnnnnnnnnnnnnnnnnnnnnnnnnnnnnnnnnnnnnnnnnnnnnnnnnnnnnnnnnnnnnnnnnnnnnnnnnnnnnnnnnnnnnnnnnnnnnnnnnnnnnnnnnnnnnnnnnnnnnnnnnnnnnnnnnnnnnnnnnnnnnnnnnnnnnnnnnnnnnnnnnnnnnnnnnnnnnnnnnnnnnnnnnnnnnnnnnnnnnnnnnnnnnnnnnnnnnnnnnnnnnnnnnnnnnnnnnnnnnnnnnnnnnnnnnnnnnnnnnnnnnnnnnnnnnnnnnnnnnnnnnnnnnnnnnnnnnnnnnnnnnnnnnnnnnnnnnnnnnnnnnnnnnnnnnnnnnnnnnnnnnnnnnnnnnnnnnnnnnnnnnnnnnnnnnnnnnnnnnnnnnnnnnnnnnnnnnnnnnnnnnnnnnnnnnnnnnnnnnnnnnnnnnnnnnnnnnnnnnnnnnnnnnnnnnnnnnnnnnnnnnnnnnnnnnnnnnnnnnnnnnnnnnnnnnnnnnnnnnnnnnnnnnnnnnnnnnnnnnnnnnnnnnnnnnnnnnnnnnnnnnnnnnnnnnnnnnnnnnnnnnnnnnnnnnnnnnnnnnnnnnnnnnnnnnnnnnnnnnnnnnnnnnnnnnnnnnnnnnnnnnnnnnnnnnnnnnnnnnnnnnnnnnnnnnnnnnnnnnnnnnnnnnnnnnnnnnnnnnnnnnnnnnnnnnnnnnnnnnnnnnnnnnnnnnnnnnnnnnnnnnnnnnnnnnnnnnnnnnnnnnnnnnnnnnnnnnnnnnnnnnnnnnnnnnnnnnnnnnnnnnnnnnnnnnnnnnnnnnnnnnnnnnnnnnnnnnnnnnnnnnnnnnnnnnnnnnnnnnnnnnnnnnnnnnnnnnnnnnnnnnnnnnnnnnnnnnnnnnnnnnnnnnnnnnnnnnnnnnnnnnnnnnnnnnnnnnnnnnnnnnnnnnnnnnnnnnnnnnnnnnnnnnnnnnnnnnnnnnnnnnnnnnnnnnnnnnnnnnnnnnnnnnnnnnnnnnnnnnnnnnnnnnnnnnnnnnnnnnnnnnnnnnnnnnnnnnnnnnnnnnnnnnnnnnnnnnnnnnnnnnnnnnnnnnnnnnnnnnnnnnnnnnnnnnnnnnnnnnnnnnnnnnnnnnnnnnnnnnnnnnnnnnnnnnnnnnnnnnnnnnnnnnnnnnnnnnnnnnnnnnnnnnnnnnnnnnnnnnnnnnnnnnnnnnnnnnnnnnnnnnnnnnnnnnnnnnnnnnnnnnnnnnnnnnnnnnnnnnnnnnnnnnnnnnnnnnnnnnnnnnnnnnnnnnnnnnnnnnnnnnnnnnnnnnnnnnnnnnnnnnnnnnnnnnnnnnnnnnnnnnnnnnnnnnnnnnnnnnnnnnnnnnnnnnnnnnnnnnnnnnnnnnnnnnnnnnnnnnnnnnnnnnnnnnnnnnnnnnnnnnnnnnnnnnnnnnnnnnnnnnnnnnnnnnnnnnnnnnnnnnnnnnnnnnnnnnnnnnnnnnnnnnnnnnnnnnnnnnnnnnnnnnnnnnnnnnnnnnnnnnnnnnnnnnnnnnnnnnnnnnnnnnnnnnnnnnnnnnnnnnnnnnnnnnnnnnnnnnnnnnnnnnnnnnnnnnnnnnnnnnnnnnnnnnnnnnnnnnnnnnnnnnnnnnnnnnnnnnnnnnnnnnnnnnnnnnnnnnnnnnnnnnnnnnnnnnnnnnnnnnnnnnnnnnnnnnnnnnnnnnnnnnnnnnnnnnnnnnnnnnnnnnnnnnnnnnnnnnnnnnnnnnnnnnnnnnnnnnnnnnnnnnnnnnnnnnnnnnnnnnnnnnnnnnnnnnnnnnnnnnnnnnnnnnnnnnnnnnnnnnnnnnnnnnnnnnnnnnnnnnnnnnnnnnnnnnnnnnnnnnnnnnnnnnnnnnnnnnnnnnnnnnnnnnnnnnnnnnnnnnnnnnnnnnnnnnnnnnnnnnnnnnnnnnnnnnnnnnnnnnnnnnnnnnnnnnnnnnnnnnnnnnnnnnnnnnnnnnnnnnnnnnnnnnnnnnnnnnnnnnnnnnnnnnnnnnnnnnnnnnnnnnnnnnnnnnnnnnnnnnnnnnnnnnnnnnnnnnnnnnnnnnnnnnnnnnnnnnnnnnnnnnnnnnnnnnnnnnnnnnnnnnnnnnnnnnnnnnnnnnnnnnnnnnnnnnnnnnnnnnnnnnnnnnnnnnnnnnnnnnnnnnnnnnnnnnnnnnnnnnnnnnnnnnnnnnnnnnnnnnnnnnnnnnnnnnnnnnnnnnnnnnnnnnnnnnnnnnnnnnnnnnnnnnnnnnnnnnnnnnnnnnnnnnnnnnnnnnnnnnnnnnnnnnnnnnnnnnnnnnnnnnnnnnnnnnnnnnnnnnnnnnnnnnnnnnnnnnnnnnnnnnnnnnnnnnnnnnnnnnnnnnnnnnnnnnnnnnnnnnnnnnnnnnnnnnnnnnnnnnnnnnnnnnnnnnnnnnnnnnnnnnnnnnnnnnnnnnnnnnnnnnnnnnnnnnnnnnnnnnnnnnnnnnnnnnnnnnnnnnnnnnnnnnnnnnnnnnnnnnnnnnnnnnnnnnnnnnnnnnnnnnnnnnnnnnnnnnnnnnnnnnnnnnnnnnnnnnnnnnnnnnnnnnnnnnnnnnnnnnnnnnnnnnnnnnnnnnnnnnnnnnnnnnnnnnnnnnnnnnnnnnnnnnnnnnnnnnnnnnnnnnnnnnnnnnnnnnnnnnnnnnnnnnnnnnnnnnnnnnnnnnnnnnnnnnnnnnnnnnnnnnnnnnnnnnnnnnnnnnnnnnnnnnnnnnnnnnnnnnnnnnnnnnnnnnnnnnnnnnnnnnnnnnnnnnnnnnnnnnnnnnnnnnnnnnnnnnnnnnnnnnnnnnnnnnnnnnnnnnnnnnnnnnnnnnnnnnnnnnnnnnnnnnnnnnnnnnnnnnnnnnnnnnnnnnnnnnnnnnnnnnnnnnnnnnnnnnnnnnnnnnnnnnnnnnnnnnnnnnnnnnnnnnnnnnnnnnnnnnnnnnnnnnnnnnnnnnnnnnnnnnnnnnnnnnnnnnnnnnnnnnnnnnnnnnnnnnnnnnnnnnnnnnnnnnnnnnnnnnnnnnnnnnnnnnnnnnnnnnnnnnnnnnnnnnnnnnnnnnnnnnnnnnnnnnnnnnnnnnnnnnnnnnnnnnnnnnnnnnnnnnnnnnnnnnnnnnnnnnnnnnnnnnnnnnnnnnnnnnnnnnnnnnnnnnnnnnnnnnnnnnnnnnnnnnnnnnnnnnnnnnnnnnnnnnnnnnnnnnnnnnnnnnnnnnnnnnnnnnnnnnnnnnnnnnnnnnnnnnnnnnnnnnnnnnnnnnnnnnnnnnnnnnnnnnnnnnnnnnnnnnnnnnnnnnnnnnnnnnnnnnnnnnnnnnnnnnnnnnnnnnnnnnnnnnnnnnnnnnnnnnnnnnnnnnnnnnnnnnnnnnnnnnnnnnnnnnnnnnnnnnnnnnnnnnnnnnnnnnnnnnnnnnnnnnnnnnnnnnnnnnnnnnnnnnnnnnnnnnnnnnnnnnnnnnnnnnnnnnnnnnnnnnnnnnnnnnnnnnnnnnnnnnnnnnnnnnnnnnnnnnnnnnnnnnnnnnnnnnnnnnnnnnnnnnnnnnnnnnnnnnnnnnnnnnnnnnnnnnnnnnnnnnnnnnnnnnnnnnnnnnnnnnnnnnnnnnnnnnnnnnnnnnnnnnnnnnnnnnnnnnnnnnnnnnnnnnnnnnnnnnnnnnnnnnnnnnnnnnnnnnnnnnnnnnnnnnnnnnnnnnnnnnnnnnnnnnnnnnnnnnnnnnnnnnnnnnnnnnnnnnnnnnnnnnnnnnnnnnnnnnnnnnnnnnnnnnnnnnnnnnnnnnnnnnnnnnnnnnnnnnnnnnnnnnnnnnnnnnnnnnnnnnnnnnnnnnnnnnnnnnnnnnnnnnnnnnnnnnnnnnnnnnnnnnnnnnnnnnnnnnnnnnnnnnnnnnnnnnnnnnnnnnnnnnnnnnnnnnnnnnnnnnnnnnnnnnnnnnnnnnnnnnnnnnnnnnnnnnnnnnnnnnnnnnnnnnnnnnnnnnnnnnnnnnnnnnnnnnnnnnnnnnnnnnnnnnnnnnnnnnnnnnnnnnnnnnnnnnnnnnnnnnnnnnnnnnnnnnnnnnnnnnnnnnnnnnnnnnnnnnnnnnnnnnnnnnnnnnnnnnnnnnnnnnnnnnnnnnnnnnnnnnnnnnnnnnnnnnnnnnnnnnnnnnnnnnnnnnnnnnnnnnnnnnnnnnnnnnnnnnnnnnnnnnnnnnnnnnnnnnnnnnnnnnnnnnnnnnnnnnnnnnnnnnnnnnnnnnnnnnnnnnnnnnnnnnnnnnnnnnnnnnnnnnnnnnnnnnnnnnnnnnnnnnnnnnnnnnnnnnnnnnnnnnnnnnnnnnnnnnnnnnnnnnnnnnnnnnnnnnnnnnnnnnnnnnnnnnnnnnnnnnnnnnnnnnnnnnnnnnnnnnnnnnnnnnnnnnnnnnnnnnnnnnnnnnnnnnnnnnnnnnnnnnnnnnnnnnnnnnnnnnnnnnnnnnnnnnnnnnnnnnnnnnnnnnnnnnnnnnnnnnnnnnnnnnnnnnnnnnnnnnnnnnnnnnnnnnnnnnnnnnnnnnnnnnnnnnnnnnnnnnnnnnnnnnnnnnnnnnnnnnnnnnnnnnnnnnnnnnnnnnnnnnnnnnnnnnnnnnnnnnnnnnnnnnnnnnnnnnnnnnnnnnnnnnnnnnnnnnnnnnnnnnnnnnnnnnnnnnnnnnnnnnnnnnnnnnnnnnnnnnnnnnnnnnnnnnnnnnnnnnnnnnnnnnnnnnnnnnnnnnnnnnnnnnnnnnnnnnnnnnnnnnnnnnnnnnnnnnnnnnnnnnnnnnnnnnnnnnnnnnnnnnnnnnnnnnnnnnnnnnnnnnnnnnnnnnnnnnnnnnnnnnnnnnnnnnnnnnnnnnnnnnnnnnnnnnnnnnnnnnnnnnnnnnnnnnnnnnnnnnnnnnnnnnnnnnnnnnnnnnnnnnnnnnnnnnnnnnnnnnnnnnnnnnnnnnnnnnnnnnnnnnnnnnnnnnnnnnnnnnnnnnnnnnnnnnnnnnnnnnnnnnnnnnnnnnnnnnnnnnnnnnnnnnnnnnnnnnnnnnnnnnnnnnnnnnnnnnnnnnnnnnnnnnnnnnnnnnnnnnnnnnnnnnnnnnnnnnnnnnnnnnnnnnnnnnnnnnnnnnnnnnnnnnnnnnnnnnnnnnnnnnnnnnnnnnnnnnnnnnnnnnnnnnnnnnnnnnnnnnnnnnnnnnnnnnnnnnnnnnnnnnnnnnnnnnnnnnnnnnnnnnnnnnnnnnnnnnnnnnnnnnnnnnnnnnnnnnnnnnnnnnnnnnnnnnnnnnnnnnnnnnnnnnnnnnnnnnnnnnnnnnnnnnnnnnnnnnnnnnnnnnnnnnnnnnnnnnnnnnnnnnnnnnnnnnnnnnnnnnnnnnnnnnnnnnnnnnnnnnnnnnnnnnnnnnnnnnnnnnnnnnnnnnnnnnnnnnnnnnnnnnnnnnnnnnnnnnnnnnnnnnnnnnnnnnnnnnnnnnnnnnnnnnnnnnnnnnnnnnnnnnnnnnnnnnnnnnnnnnnnnnnnnnnnnnnnnnnnnnnnnnnnnnnnnnnnnnnnnnnnnnnnnnnnnnnnnnnnnnnnnnnnnnnnnnnnnnnnnnnnnnnnnnnnnnnnnnnnnnnnnnnnnnnnnnnnnnnnnnnnnnnnnnnnnnnnnnnnnnnnnnnnnnnnnnnnnnnnnnnnnnnnnnnnnnnnnnnnnnnnnnnnnnnnnnnnnnnnnnnnnnnnnnnnnnnnnnnnnnnnnnnnnnnnnnnnnnnnnnnnnnnnnnnnnnnnnnnnnnnnnnnnnnnnnnnnnnnnnnnnnnnnnnnnnnnnnnnnnnnnnnnnnnnnnnnnnnnnnnnnnnnnnnnnnnnnnnnnnnnnnnnnnnnnnnnnnnnnnnnnnnnnnnnnnnnnnnnnnnnnnnnnnnnnnnnnnnnnnnnnnnnnnnnnnnnnnnnnnnnnnnnnnnnnnnnnnnnnnnnnnnnnnnnnnnnnnnnnnnnnnnnnnnnnnnnnnnnnnnnnnnnnnnnnnnnnnnnnnnnnnnnnnnnnnnnnnnnnnnnnnnnnnnnnnnnnnnnnnnnnnnnnnnnnnnnnnnnnnnnnnnnnnnnnnnnnnnnnnnnnnnnnnnnnnnnnnnnnnnnnnnnnnnnnnnnnnnnnnnnnnnnnnnnnnnnnnnnnnnnnnnnnnnnnnnnnnnnnnnnnnnnnnnnnnnnnnnnnnnnnnnnnnnnnnnnnnnnnnnnnnnnnnnnnnnnnnnnnnnnnnnnnnnnnnnnnnnnnnnnnnnnnnnnnnnnnnnnnnnnnnnnnnnnnnnnnnnnnnnnnnnnnnnnnnnnnnnnnnnnnnnnnnnnnnnnnnnnnnnnnnnnnnnnnnnnnnnnnnnnnnnnnnnnnnnnnnnnnnnnnnnnnnnnnnnnnnnnnnnnnnnnnnnnnnnnnnnnnnnnnnnnnnnnnnnnnnnnnnnnnnnnnnnnnnnnnnnnnnnnnnnnnnnnnnnnnnnnnnnnnnnnnnnnnnnnnnnnnnnnnnnnnnnnnnnnnnnnnnnnnnnnnnnnnnnnnnnnnnnnnnnnnnnnnnnnnnnnnnnnnnnnnnnnnnnnnnnnnnnnnnnnnnnnnnnnnnnnnnnnnnnnnnnnnnnnnnnnnnnnnnnnnnnnnnnnnnnnnnnnnnnnnnnnnnnnnnnnnnnnnnnnnnnnnnnnnnnnnnnnnnnnnnnnnnnnnnnnnnnnnnnnnnnnnnnnnnnnnnnnnnnnnnnnnnnnnnnnnnnnnnnnnnnnnnnnnnnnnnnnnnnnnnnnnnnnnnnnnnnnnnnnnnnnnnnnnnnnnnnnnnnnnnnnnnnnnnnnnnnnnnnnnnnnnnnnnnnnnnnnnnnnnnnnnnnnnnnnnnnnnnnnnnnnnnnnnnnnnnnnnnnnnnnnnnnnnnnnnnnnnnnnnnnnnnnnnnnnnnnnnnnnnnnnnnnnnnnnnnnnnnnnnnnnnnnnnnnnnnnnnnnnnnnnnnnnnnnnnnnnnnnnnnnnnnnnnnnnnnnnnnnnnnnnnnnnnnnnnnnnnnnnnnnnnnnnnnnnnnnnnnnnnnnnnnnnnnnnnnnnnnnnnnnnnnnnnnnnnnnnnnnnnnnnnnnnnnnnnnnnnnnnnnnnnnnnnnnnnnnnnnnnnnnnnnnnnnnnnnnnnnnnnnnnnnnnnnnnnnnnnnnnnnnnnnnnnnnnnnnnnnnnnnnnnnnnnnnnnnnnnnnnnnnnnnnnnnnnnnnnnnnnnnnnnnnnnnnnnnnnnnnnnnnnnnnnnnnnnnnnnnnnnnnnnnnnnnnnnnnnnnnnnnnnnnnnnnnnnnnnnnnnnnnnnnnnnnnnnnnnnnnnnnnnnnnnnnnnnnnnnnnnnnnnnnnnnnnnnnnnnnnnnnnnnnnnnnnnnnnnnnnnnnnnnnnnnnnnnnnnnnnnnnnnnnnnnnnnnnnnnnnnnnnnnnnnnnnnnnnnnnnnnnnnnnnnnnnnnnnnnnnnnnnnnnnnnnnnnnnnnnnnnnnnnnnnnnnnnnnnnnnnnnnnnnnnnnnnnnnnnnnnnnnnnnnnnnnnnnnnnnnnnnnnnnnnnnnnnnnnnnnnnnnnnnnnnnnnnnnnnnnnnnnnnnnnnnnnnnnnnnnnnnnnnnnnnnnnnnnnnnnnnnnnnnnnnnnnnnnnnnnnnnnnnnnnnnnnnnnnnnnnnnnnnnnnnnnnnnnnnnnnnnnnnnnnnnnnnnnnnnnnnnnnnnnnnnnnnnnnnnnnnnnnnnnnnnnnnnnnnnnnnnnnnnnnnnnnnnnnnnnnnnnnnnnnnnnnnnnnnnnnnnnnnnnnnnnnnnnnnnnnnnnnnnnnnnnnnnnnnnnnnnnnnnnnnnnnnnnnnnnnnnnnnnnnnnnnnnnnnnnnnnnnnnnnnnnnnnnnnnnnnnnnnnnnnnnnnnnnnnnnnnnnnnnnnnnnnnnnnnnnnnnnnnnnnnnnnnnnnnnnnnnnnnnnnnnnnnnnnnnnnnnnnnnnnnnnnnnnnnnnnnnnnnnnnnnnnnnnnnnnnnnnnnnnnnnnnnnnnnnnnnnnnnnnnnnnnnnnnnnnnnnnnnnnnnnnnnnnnnnnnnnnnnnnnnnnnnnnnnnnnnnnnnnnnnnnnnnnnnnnnnnnnnnnnnnnnnnnnnnnnnnnnnnnnnnnnnnnnnnnnnnnnnnnnnnnnnnnnnnnnnnnnnnnnnnnnnnnnnnnnnnnnnnnnnnnnnnnnnnnnnnnnnnnnnnnnnnnnnnnnnnnnnnnnnnnnnnnnnnnnnnnnnnnnnnnnnnnnnnnnnnnnnnnnnnnnnnnnnnnnnnnnnnnnnnnnnnnnnnnnnnnnnnnnnnnnnnnnnnnnnnnnnnnnnnnnnnnnnnnnnnnnnnnnnnnnnnnnnnnnnnnnnnnnnnnnnnnnnnnnnnnnnnnnnnnnnnnnnnnnnnnnnnnnnnnnnnnnnnnnnnnnnnnnnnnnnnnnnnnnnnnnnnnnnnnnnnnnnnnnnnnnnnnnnnnnnnnnnnnnnnnnnnnnnnnnnnnnnnnnnnnnnnnnnnnnnnnnnnnnnnnnnnnnnnnnnnnnnnnnnnnnnnnnnnnnnnnnnnnnnnnnnnnnnnnnnnnnnnnnnnnnnnnnnnnnnnnnnnnnnnnnnnnnnnnnnnnnnnnnnnnnnnnnnnnnnnnnnnnnnnnnnnnnnnnnnnnnnnnnnnnnnnnnnnnnnnnnnnnnnnnnnnnnnnnnnnnnnnnnnnnnnnnnnnnnnnnnnnnnnnnnnnnnnnnnnnnnnnnnnnnnnnnnnnnnnnnnnnnnnnnnnnnnnnnnnnnnnnnnnnnnnnnnnnnnnnnnnnnnnnnnnnnnnnnnnnnnnnnnnnnnnnnnnnnnnnnnnnnnnnnnnnnnnnnnnnnnnnnnnnnnnnnnnnnnnnnnnnnnnnnnnnnnnnnnnnnnnnnnnnnnnnnnnnnnnnnnnnnnnnnnnnnnnnnnnnnnnnnnnnnnnnnnnnnnnnnnnnnnnnnnnnnnnnnnnnnnnnnnnnnnnnnnnnnnnnnnnnnnnnnnnnnnnnnnnnnnnnnnnnnnnnnnnnnnnnnnnnnnnnnnnnnnnnnnnnnnnnnnnnnnnnnnnnnnnnnnnnnnnnnnnnnnnnnnnnnnnnnnnnnnnnnnnnnnnnnnnnnnnnnnnnnnnnnnnnnnnnnnnnnnnnnnnnnnnnnnnnnnnnnnnnnnnnnnnnnnnnnnnnnnnnnnnnnnnnnnnnnnnnnnnnnnnnnnnnnnnnnnnnnnnnnnnnnnnnnnnnnnnnnnnnnnnnnnnnnnnnnnnnnnnnnnnnnnnnnnnnnnnnnnnnnnnnnnnnnnnnnnnnnnnnnnnnnnnnnnnnnnnnnnnnnnnnnnnnnnnnnnnnnnnnnnnnnnnnnnnnnnnnnnnnnnnnnnnnnnnnnnnnnnnnnnnnnnnnnnnnnnnnnnnnnnnnnnnnnnnnnnnnnnnnnnnnnnnnnnnnnnnnnnnnnnnnnnnnnnnnnnnnnnnnnnnnnnnnnnnnnnnnnnnnnnnnnnnnnnnnnnnnnnnnnnnnnnnnnnnnnnnnnnnnnnnnnnnnnnnnnnnnnnnnnnnnnnnnnnnnnnnnnnnnnnnnnnnnnnnnnnnnnnnnnnnnnnnnnnnnnnnnnnnnnnnnnnnnnnnnnnnnnnnnnnnnnnnnnnnnnnnnnnnnnnnnnnnnnnnnnnnnnnnnnnnnnnnnnnnnnnnnnnnnnnnnnnnnnnnnnnnnnnnnnnnnnnnnnnnnnnnnnnnnnnnnnnnnnnnnnnnnnnnnnnnnnnnnnnnnnnnnnnnnnnnnnnnnnnnnnnnnnnnnnnnnnnnnnnnnnnnnnnnnnnnnnnnnnnnnnnnnnnnnnnnnnnnnnnnnnnnnnnnnnnnnnnnnnnnnnnnnnnnnnnnnnnnnnnnnnnnnnnnnnnnnnnnnnnnnnnnnnnnnnnnnnnnnnnnnnnnnnnnnnnnnnnnnnnnnnnnnnnnnnnnnnnnnnnnnnnnnnnnnnnnnnnnnnnnnnnnnnnnnnnnnnnnnnnnnnnnnnnnnnnnnnnnnnnnnnnnnnnnnnnnnnnnnnnnnnnnnnnnnnnnnnnnnnnnnnnnnnnnnnnnnnnnnnnnnnnnnnnnnnnnnnnnnnnnnnnnnnnnnnnnnnnnnnnnnnnnnnnnnnnnnnnnnnnnnnnnnnnnnnnnnnnnnnnnnnnnnnnnnnnnnnnnnnnnnnnnnnnnnnnnnnnnnnnnnnnnnnnnnnnnnnnnnnnnnnnnnnnnnnnnnnnnnnnnnnnnnnnnnnnnnnnnnnnnnnnnnnnnnnnnnnnnnnnnnnnnnnnnnnnnnnnnnnnnnnnnnnnnnnnnnnnnnnnnnnnnnnnnnnnnnnnnnnnnnnnnnnnnnnnnnnnnnnnnnnnnnnnnnnnnnnnnnnnnnnnnnnnnnnnnnnnnnnnnnnnnnnnnnnnnnnnnnnnnnnnnnnnnnnnnnnnnnnnnnnnnnnnnnnnnnnnnnnnnnnnnnnnnnnnnnnnnnnnnnnnnnnnnnnnnnnnnnnnnnnnnnnnnnnnnnnnnnnnnnnnnnnnnnnnnnnnnnnnnnnnnnnnnnnnnnnnnnnnnnnnnnnnnnnnnnnnnnnnnnnnnnnnnnnnnnnnnnnnnnnnnnnnnnnnnnnnnnnnnnnnnnnnnnnnnnnnnnnnnnnnnnnnnnnnnnnnnnnnnnnnnnnnnnnnnnnnnnnnnnnnnnnnnnnnnnnnnnnnnnnnnnnnnnnnnnnnnnnnnnnnnnnnnnnnnnnnnnnnnnnnnnnnnnnnnnnnnnnnnnnnnnnnnnnnnnnnnnnnnnnnnnnnnnnnnnnnnnnnnnnnnnnnnnnnnnnnnnnnnnnnnnnnnnnnnnnnnnnnnnnnnnnnnnnnnnnnnnnnnnnnnnnnnnnnnnnnnnnnnnnnnnnnnnnnnnnnnnnnnnnnnnnnnnnnnnnnnnnnnnnnnnnnnnnnnnnnnnnnnnnnnnnnnnnnnnnnnnnnnnnnnnnnnnnnnnnnnnnnnnnnnnnnnnnnnnnnnnnnnnnnnnnnnnnnnnnnnnnnnnnnnnnnnnnnnnnnnnnnnnnnnnnnnnnnnnnnnnnnnnnnnnnnnnnnnnnnnnnnnnnnnnnnnnnnnnnnnnnnnnnnnnnnnnnnnnnnnnnnnnnnnnnnnnnnnnnnnnnnnnnnnnnnnnnnnnnnnnnnnnnnnnnnnnnnnnnnnnnnnnnnnnnnnnnnnnnnnnnnnnnnnnnnnnnnnnnnnnnnnnnnnnnnnnnnnnnnnnnnnnnnnnnnnnnnnnnnnnnnnnnnnnnnnnnnnnnnnnnnnnnnnnnnnnnnnnnnnnnnnnnnnnnnnnnnnnnnnnnnnnnnnnnnnnnnnnnnnnnnnnnnnnnnnnnnnnnnnnnnnnnnnnnnnnnnnnnnnnnnnnnnnnnnnnnnnnnnnnnnnnnnnnnnnnnnnnnnnnnnnnnnnnnnnnnnnnnnnnnnnnnnnnnnnnnnnnnnnnnnnnnnnnnnnnnnnnnnnnnnnnnnnnnnnnnnnnnnnnnnnnnnnnnnnnnnnnnnnnnnnnnnnnnnnnnnnnnnnnnnnnnnnnnnnnnnnnnnnnnnnnnnnnnnnnnnnnnnnnnnnnnnnnnnnnnnnnnnnnnnnnnnnnnnnnnnnnnnnnnnnnnnnnnnnnnnnnnnnnnnnnnnnnnnnnnnnnnnnnnnnnnnnnnnnnnnnnnnnnnnnnnnnnnnnnnnnnnnnnnnnnnnnnnnnnnnnnnnnnnnnnnnnnnnnnnnnnnnnnnnnnnnnnnnnnnnnnnnnnnnnnnnnnnnnnnnnnnnnnnnnnnnnnnnnnnnnnnnnnnnnnnnnnnnnnnnnnnnnnnnnnnnnnnnnnnnnnnnnnnnnnnnnnnnnnnnnnnnnnnnnnnnnnnnnnnnnnnnnnnnnnnnnnnnnnnnnnnnnnnnnnnnnnnnnnnnnnnnnnnnnnnnnnnnnnnnnnnnnnnnnnnnnnnnnnnnnnnnnnnnnnnnnnnnnnnnnnnnnnnnnnnnnnnnnnnnnnnnnnnnnnnnnnnnnnnnnnnnnnnnnnnnnnnnnnnnnnnnnnnnnnnnnnnnnnnnnnnnnnnnnnnnnnnnnnnnnnnnnnnnnnnnnnnnnnnnnnnnnnnnnnnnnnnnnnnnnnnnnnnnnnnnnnnnnnnnnnnnnnnnnnnnnnnnnnnnnnnnnnnnnnnnnnnnnnnnnnnnnnnnnnnnnnnnnnnnnnnnnnnnnnnnnnnnnnnnnnnnnnnnnnnnnnnnnnnnnnnnnnnnnnnnnnnnnnnnnnnnnnnnnnnnnnnnnnnnnnnnnnnnnnnnnnnnnnnnnnnnnnnnnnnnnnnnnnnnnnnnnnnnnnnnnnnnnnnnnnnnnnnnnnnnnnnnnnnnnnnnnnnnnnnnnnnnnnnnnnnnnnnnnnnnnnnnnnnnnnnnnnnnnnnnnnnnnnnnnnnnnnnnnnnnnnnnnnnnnnnnnnnnnnnnnnnnnnnnnnnnnnnnnnnnnnnnnnnnnnnnnnnnnnnnnnnnnnnnnnnnnnnnnnnnnnnnnnnnnnnnnnnnnnnnnnnnnnnnnnnnnnnnnnnnnnnnnnnnnnnnnnnnnnnnnnnnnnnnnnnnnnnnnnnnnnnnnnnnnnnnnnnnnnnnnnnnnnnnnnnnnnnnnnnnnnnnnnnnnnnnnnnnnnnnnnnnnnnnnnnnnnnnnnnnnnnnnnnnnnnnnnnnnnnnnnnnnnnnnnnnnnnnnnnnnnnnnnnnnnnnnnnnnnnnnnnnnnnnnnnnnnnnnnnnnnnnnnnnnnnnnnnnnnnnnnnnnnnnnnnnnnnnnnnnnnnnnnnnnnnnnnnnnnnnnnnnnnnnnnnnnnnnnnnnnnnnnnnnnnnnnnnnnnnnnnnnnnnnnnnnnnnnnnnnnnnnnnnnnnnnnnnnnnnnnnnnnnnnnnnnnnnnnnnnnnnnnnnnnnnnnnnnnnnnnnnnnnnnnnnnnnnnnnnnnnnnnnnnnnnnnnnnnnnnnnnnnnnnnnnnnnnnnnnnnnnnnnnnnnnnnnnnnnnnnnnnnnnnnnnnnnnnnnnnnnnnnnnnnnnnnnnnnnnnnnnnnnnnnnnnnnnnnnnnnnnnnnnnnnnnnnnnnnnnnnnnnnnnnnnnnnnnnnnnnnnnnnnnnnnnnnnnnnnnnnnnnnnnnnnnnnnnnnnnnnnnnnnnnnnnnnnnnnnnnnnnnnnnnnnnnnnnnnnnnnnnnnnnnnnnnnnnnnnnnnnnnnnnnnnnnnnnnnnnnnnnnnnnnnnnnnnnnnnnnnnnnnnnnnnnnnnnnnnnnnnnnnnnnnnnnnnnnnnnnnnnnnnnnnnnnnnnnnnnnnnnnnnnnnnnnnnnnnnnnnnnnnnnnnnnnnnnnnnnnnnnnnnnnnnnnnnnnnnnnnnnnnnnnnnnnnnnnnnnnnnnnnnnnnnnnnnnnnnnnnnnnnnnnnnnnnnnnnnnnnnnnnnnnnnnnnnnnnnnnnnnnnnnnnnnnnnnnnnnnnnnnnnnnnnnnnnnnnnnnnnnnnnnnnnnnnnnnnnnnnnnnnnnnnnnnnnnnnnnnnnnnnnnnnnnnnnnnnnnnnnnnnnnnnnnnnnnnnnnnnnnnnnnnnnnnnnnnnnnnnnnnnnnnnnnnnnnnnnnnnnnnnnnnnnnnnnnnnnnnnnnnnnnnnnnnnnnnnnnnnnnnnnnnnnnnnnnnnnnnnnnnnnnnnnnnnnnnnnnnnnnnnnnnnnnnnnnnnnnnnnnnnnnnnnnnnnnnnnnnnnnnnnnnnnnnnnnnnnnnnnnnnnnnnnnnnnnnnnnnnnnnnnnnnnnnnnnnnnnnnnnnnnnnnnnnnnnnnnnnnnnnnnnnnnnnnnnnnnnnnnnnnnnnnnnnnnnnnnnnnnnnnnnnnnnnnnnnnnnnnnnnnnnnnnnnnnnnnnnnnnnnnnnnnnnnnnnnnnnnnnnnnnnnnnnnnnnnnnnnnnnnnnnnnnnnnnnnnnnnnnnnnnnnnnnnnnnnnnnnnnnnnnnnnnnnnnnnnnnnnnnnnnnnnnnnnnnnnnnnnnnnnnnnnnnnnnnnnnnnnnnnnnnnnnnnnnnnnnnnnnnnnnnnnnnnnnnnnnnnnnnnnnnnnnnnnnnnnnnnnnnnnnnnnnnnnnnnnnnnnnnnnnnnnnnnnnnnnnnnnnnnnnnnnnnnnnnnnnnnnnnnnnnnnnnnnnnnnnnnnnnnnnnnnnnnnnnnnnnnnnnnnnnnnnnnnnnnnnnnnnnnnnnnnnnnnnnnnnnnnnnnnnnnnnnnnnnnnnnnnnnnnnnnnnnnnnnnnnnnnnnnnnnnnnnnnnnnnnnnnnnnnnnnnnnnnnnnnnnnnnnnnnnnnnnnnnnnnnnnnnnnnnnnnnnnnnnnnnnnnnnnnnnnnnnnnnnnnnnnnnnnnnnnnnnnnnnnnnnnnnnnnnnnnnnnnnnnnnnnnnnnnnnnnnnnnnnnnnnnnnnnnnnnnnnnnnnnnnnnnnnnnnnnnnnnnnnnnnnnnnnnnnnnnnnnnnnnnnnnnnnnnnnnnnnnnnnnnnnnnnnnnnnnnnnnnnnnnnnnnnnnnnnnnnnnnnnnnnnnnnnnnnnnnnnnnnnnnnnnnnnnnnnnnnnnnnnnnnnnnnnnnnnnnnnnnnnnnnnnnnnnnnnnnnnnnnnnnnnnnnnnnnnnnnnnnnnnnnnnnnnnnnnnnnnnnnnnnnnnnnnnnnnnnnnnnnnnnnnnnnnnnnnnnnnnnnnnnnnnnnnnnnnnnnnnnnnnnnnnnnnnnnnnnnnnnnnnnnnnnnnnnnnnnnnnnnnnnnnnnnnnnnnnnnnnnnnnnnnnnnnnnnnnnnnnnnnnnnnnnnnnnnnnnnnnnnnnnnnnnnnnnnnnnnnnnnnnnnnnnnnnnnnnnnnnnnnnnnnnnnnnnnnnnnnnnnnnnnnnnnnnnnnnnnnnnnnnnnnnnnnnnnnnnnnnnnnnnnnnnnnnnnnnnnnnnnnnnnnnnnnnnnnnnnnnnnnnnnnnnnnnnnnnnnnnnnnnnnnnnnnnnnnnnnnnnnnnnnnnnnnnnnnnnnnnnnnnnnnnnnnnnnnnnnnnnnnnnnnnnnnnnnnnnnnnnnnnnnnnnnnnnnnnnnnnnnnnnnnnnnnnnnnnnnnnnnnnnnnnnnnnnnnnnnnnnnnnnnnnnnnnnnnnnnnnnnnnnnnnnnnnnnnnnnnnnnnnnnnnnnnnnnnnnnnnnnnnnnnnnnnnnnnnnnnnnnnnnnnnnnnnnnnnnnnnnnnnnnnnnnnnnnnnnnnnnnnnnnnnnnnnnnnnnnnnnnnnnnnnnnnnnnnnnnnnnnnnnnnnnnnnnnnnnnnnnnnnnnnnnnnnnnnnnnnnnnnnnnnnnnnnnnnnnnnnnnnnnnnnnnnnnnnnnnnnnnnnnnnnnnnnnnnnnnnnnnnnnnnnnnnnnnnnnnnnnnnnnnnnnnnnnnnnnnnnnnnnnnnnnnnnnnnnnnnnnnnnnnnnnnnnnnnnnnnnnnnnnnnnnnnnnnnnnnnnnnnnnnnnnnnnnnnnnnnnnnnnnnnnnnnnnnnnnnnnnnnnnnnnnnnnnnnnnnnnnnnnnnnnnnngaagaagggcgccaagatcagccacagcgccagaaggggatagaccacatagaggatcttgcgcaggcgccggattgccagcagcggagccaggcagatcatcagggggacgatccagtccaaaaaacggatatgcaacaccggaagcacaaagtaaagcatgaaacccagcagcagaatggacagcactatggcaggcagggctttgatcctgaacttgggaaacttgatcacgacaggtttgggcgtttgttgttgaaacatggtaacctccctgaactaagctttgttttgatactgtgccagatggcggcggatttgtcaagccggaatcgtggctcgcctccactggcagaatggaaaaaagtggactcggctcggacggcaccctatccttgcggatacagaggcgcgaccgcccgctcaaacactccctgaaccttggaaatggccagcccgtaattggtgatcggcactccgcgccgctgggcttccacgatgcggcggctcatctccatctggttgagcatgcaggctccgcagtggatcaccagcgcgaattcctccagattgggcggaaagtcgtgtcccgcgtaaacttcatactccagttccttgcccgtgaactggctcagccagcgcggaatcttcacccgcccgatgtcatccgcctgcacgtggtgggaacaggcttcggcgatcaggatcttgtcgccgtcgcgcagcttgtcgatctgcctcaccccttccgccaggacgtccagatcgcctttgtagcgggcaaagaggatggaaaaggtggtcatcttcacctcggggggcaggtcattcaccaccttcagcaccacctgcgaatccgtgatcaccagatcaggcggctccttcagggtttgcaaggcataggccagttcccgctctttcaccaccgtcaccaccgcgtcgtgatccagcagttcgcgaatcacctgcacctgcggcaggatcaggcgtcccttgggcgcggcgaggtcgatgggagtcaccagcagcaccctgtccccggccttcaccaagtcacccgccagggggcgctcctccagcagatgggcgggcgccagcttgatcagcagttccttggcggcatcgatgttttcccccttgagggcggagacggagacccagggcagtccccgttcctcgcaccaggcgatattggcgggggcaggctcgcgcaaatccctgtggttaaagaccattaacagcggtatcttcatctcgcggatgcgtttcagggaggacagctcgctctccgcgaaggggcggccatcgttcacaaacacggctatgtccgtgcggtaaagtatcttataggtggcgagtacccgtttttcgcccagttcgccgctgtcgtccagtccagcggtgtcaaagaaggtcaccgggcccaggggcagaagttcatagcgtttgtccaccgggtctgtggtggtgcccggggtgctggaaacgatggctatctcctgtcctgccagggcgttgatcaaggacgattttccagcgttgcggttacccagcagggtgatgtttacgcgttctccgcggggtgtgctcatctatcttctcccaaaaagtcttgcggcttgcggccgctaatagcttttattatcagttctttcatgtttctttccttgtcggactggataccagcccatgtaaaaataatatatgtgaaaagcgcgaatctgtcaagcaaagagaattctggcagacaggggcctgtgtttttgatatatccacaaattacacaaattaacacggattaaaagaacagaataaggacaagtgtccagcctaaaaacaacaaccagaccctgaaacaaaccgccaccaagccctaaagccgtgtcatcccgggctgtcggggtcaccgccaaagcgcgaagcggtttggtggggtggcttgacccgggatccagtcttttaaaaacaaccagcaagccccgaaacaaagcacaacagactaaaaaccgtgtcatcccgggctgtcggggtccccgccaaagcgcgaagcggtttggtggggtggcttgacccgggatccagtcttttagaaacaaacgcgtaaggttttaaaaaagcaggcacctttccacctcaaaacacctttccacaaattctccccccatatatataggtgctacgaccccttcatgccaggcgggaagcggatcccagggcaagtatatatatacttgcccgtaattgcgcggccatgggctggctgccctccctttcccctcgcgcgcgggtggctctcatttgcatccagcgttttggcgtgagtcttccttaggtcatccttataatttataaggttgacctaaggatgatggcatcaaatccagtagcagcaaaggagggcggtatgaaggattatgcggaaggttgtggtatttttgtggaaaggtggaaaggtgcccccgaaacaagtccaccaagttatattttgtgtcatcacgggaagtcggggccccctctggggtggcttacccgtgatccagtctttttaaaagaaacatccacaaattacacaaattaacacgaattaaaagaacattaaagagtcaacacacccgactccggaacaaaaccctccagactaaaaaccgtgtcatcacagcctgcgagccgtgatccagtgcccaggtgtggcaaagtccgtttgccacagagaccggaggtctcttccaaacaggcaactccgttgcctctgccgaacggacttcggcaacccttatattacaccaatccgtgtcaatctgcgccctttatccgcgtttatctgcgtgaaccgtggaacccgggatccagtcttttggaatgtttgaacttcgctgaaaacatttttcgctaccaggaatgaaaactggacaacaaacgcagcttgggatatctgacactaagagtgtaattcacacgatcaataagaacatagcgtgctgtgcatacaaaacatattaccgacggacttctgttctgaaatatggacgttttgaacttggtaaacagtccgtatatggactaccagctgggacttgccattaggcatatgcccgaatgtaaagctatattcttatataacgcattgtagacagcacaggttgttctctgctctttccatattacactagtggtcatcatttcaccagtaggggtttttttacgcttttttcccgggagttttcatgtaaagcaccctactggacaaagagatgggagccggaaaacacagcctgaactgggacggcaccgactccaacggcgcccaactggcaagcggagtctatatctaccgcctcagcaccggaaagacgagcgccagccgcaaaatgatattgctgaagtgacggacagccgcccttccaagtccgataattaacttgaaccgccgcgcattacacacggcggttctttccaacaagccaagtatcagcagcgggaaaactgcgctgaaaaagccgctggtggggctccgtaaaatgggagtggaagccgccgcatggaacaccttgaaagtaacaagataccgccccaaattgatctttcctaacccaaaatccgcaaagcaaatttcttgacaatgatctttggcttaaatataaggttcctatcgaacaaaaggagcatgttatgtacaatcttctttgtgataattgggtaaacgtggtctatctttcgggcaaaccagatagaatatctttagttcaaactcttgaagacgcacactgtctgcaactggcatacagcaatcctatggaccggttcgctgttttcagattcctgcttgctcttggctactggtgtttcgccaacaccaacggggagcctgaacctgataagccgcttccgacctcctggatatcctggctggaagaaaacaaggggtatttcgagctttttggggatggacagagatttttccaagccgatcccagttccaggatcagagccattaccgaccttattcatgagataccaacagctcacaacctatgccatttcaatcatgtcaccgactatatcgatgggctctgcgaagcttgctgcatcaagggactgctgagattacctgtctttaccactgtcggtggcagagggataggcgcgggaatcaacaacactcctccattttacctgctctggcatgcaaatgacctcgctggcatgctggttcaaaattggcaaccctgggataatatggggattccggcatggttgggttcttttcaaaaagaaagcaggaaagtgggcttacttgccggaatgacctggctgccgcgcaaggtgcatctgcatgatcctgtctcaggtcaggcagcatgttgttcctgcggcttaccctccaaagctctcgtctattcctgcagcataaaacctgaaccagtgccggaaggccttaaatggaaagaccctcatggtgtttacaccgatcagggaaaaagtctccagtccaaaatcaaactgatgtccaatgatagatacactttcgcggaccgggattggtatagcccgttgttcagctatttgcacgcggaaggaaactccagacaaggaaaactatggttggttggatttgccagcgataaagcaaaaagcatagacatctgggacaagatcatcgagcttgagggaactgatacaaatgatgagctactggctcaattggcaaacagggctactgcccttaatgccatgcgcaagaagcctctcagaggtgatttcaaaaagtcagtgggcactccccagattgctgacattatcccccatgccgaaagcagaattgccctcaatgcgggtaaaatgactgagaacaggggctattcctggcaggatgccgatactgaatacggagaactgctcaccaaggttgcatgctctttggagccggctcaaacagtggacgccaggctcaagagaggtaaattcatttcccgcaagccctggccagttataccagaatccaaaacaaaacccgcagaggaggaccagaatgaatagaggaaccgttgacttcattgcaagcctggagaacctcaaagaaggcgatttgggcattcttagaaaactcaggggagcccggcttgatgaaaagcttcccggatttgacctgttttccgccctatggtggcctttgcggcaaaagaatcaacgcgctcccaagcgtgaagtggcttggttgatcgccaaactttttgctgaattccgctttgaacagcgcgagggagccacattgcccattcttatgggaggcatctgccggaagttggaacccaaaaaggaattaccccgggtattggcacgctttgatcaactcgcatcgcttgacattatgcagatggaagagccgctgtcggtcatcatgggtattttgcgcaagcaccagcaggtctgcctggactgggtagggcttactgatgttctgtcattttgggagcaggaacctgtcaaaagagaatggtcggattcatttattaaagcatacaagatcaacaaggaggattcagatgttgattgaaattcatatgattcagaatcacagcccggcaaatcttaaccgggacgacttgggcgcccccaagacctgttatttcggtggagtattacgttctcgcatctccagccagtgcatcaagcgcagcatccgttttgccccggaattcgcggaccttagaggaggtatccgaacaaggcgtctggcagagaaactcgaggaaatgctggaaaacaaagataagaagctggttgccaagtttcttgaagcctgcggaatcaaaaccaaatcttccaagaaagctgcaaaaaagtccgaaaagatacccgcggaagccgatgaagatcaggatgagcagcaggcggctgatacatctgacatgctggtttttaccacttatgatgccctgcgccaaatggcagagctgctttccgactccaaactaagtgaaagcgaaaaactgctgcagttcaaagatttgctcacaaactgcgtccattctccggatatagcactttgcggcaggatgttggagaccaaagagcttaaaaacactggcgttgaaggcgccctacaggttgcacatgcgatctccacccacattgccagacctgagatagactattttgtggcggccgatgatgttcccggtgaagacgccggagcgggtcatattggcgaatccatgtttgcctcagcctgtttctacaaatacttctccattgattgggaacagttggtcaagaacctgaaaggggacacgaatctggcagcccacaccgtgggtgcctttctcctcgccgcagccaaaaccaaccccagtggcaaacagaacagcttcgccgctcataactatcccgatggcatccttgttgagttcaagaattcccctattagctacgccaacgcattcgtcaggccagtttccgtggtcaaggaatcggacctggtggaacaaagcatcggccagctttccaactacgtgaacgacatcaggcttggctattatgatgagcaatccccagttatcagcttctggttttctccaaacaatcgctattcccttggcaatgagcattccaaactggcttccagaaacattggcaacctcaatgagcttgtaggcgctgtgttggattatattggcggcttcaagtgggaagaagttcagaaaagcaaggcttatgttggcggctgacatgagtgcgccacccaacaccttattcttgcgcttggagggggctttgcagtcttggggcagcaacgaggctaagtttgctttgcgcaggactaccgacgctcccacaaaatcaggtgtcctggggctgctttgcgcggccatgggaattgggcgcgcggaggctgctgattcatggctcccaaaactcgccaacctgcgcatgggcgtgcggatagaccgccccggcatacgctggtgggacttccatactgttggagcgggacaaagaatgcgcatggcagagctgaaggcacccaaaaaaccttccatggttggagctgccctggctgataccctgacaccaagcaaagtaaaaaccagggcagagaccttgctctcacgccgcgaatatcttgccgacgccagttttctggtcgccttgcagggtgagccggaacttgtggaaaagctctccgccgctctggccaagccggtctgggcaatttatctggggcgcaaatcctgtcccccttcacgtcccgtgggcgagcatgctccgggcttttataacactttggaggaggcgctgtccgcggttcccctgcaaaagcgctggcacaatgaacccctgccgcaaatactgccttgcgtcatggactggatccccagccaggacggagaacatgcgcctgatgacgcggagattcattacgatctgccggtttcttttcagccgccccgccatttgccgcgcttcgtgatcaggcgtgagctggttgtgggagaggatgtgcaagtgagcagggaaaccggaaccagcgtttggaggcccaaaggaacccgggcggattataacaattccgagtataagaaggtcagggcggagcggcttgtgatggaccatgccgcgtgcatggtatgcaaagctcccgccacgactgttcaacacgtgaattaccgcagggcgggaggcaaggaaataccggaagacctgcgggcgctgtgccgcctctgccacgacgcctgcaccatgctggaatacggttccggcatgaccaccgaccgcatcgacccctgcgaccccatctggcgggagcgaatactggcaaagcgcaaagatatagtcgagttccgttcgcgcgggcagcgtttccgcaaaatgaagccagaggaggaaaacggatgatctacttgtccaagctattgatcgatactggaggcaatccagaccgtccccgccccggcagaaagtggctggacaatatctataacgtccaccgccgcctttccatggcgttcccttcaggtttgcgccgggagcaggatccgcatttcctgaagcccttttcgccaaacgacttccaaaaaactcccttccttttccgggtcgataacaacatcgacggaaacgataaaagggcgattattatcgtccagtccgttcttgagccggattgggattattgcttccaaaacgcgcttgatttcctggcagcgccaccggaaacaaaggagtataatccagagtttcaagcgggacaactgctccggttcaggctgcgggtaaacgccagcgtacgccgtcatattcctgagaaggtgcaacaggacggtcaaaccatagaaactggcaacatcctgcacaaaagggtttctctcacctgggatccctcttccaccccggatcaggcccttgccgactggctggctgccaaaagcccaaagctgggcttcacccttcagcgctgtgagcttcttcaactgggttgggtttatggctccaagcctgaacctaaaaatgtcaaagcaaaggaacagggacagggctactggcgtgaacacacatacaatcctctgcgcttccgttcggctctactggagggaattctcaaagtggatgacccgaaactgttcctggaaacgcttagaagcggcattggaaaagcgaaaagcttcggctttggcctgctgtccgttctgccaatcaggaatgatgaataaagacctgcactctatcccccggatcagagatcggcttagctatctctatgtggagcatgccaaaattgatcagaacgggcaagccatcgccattcacgatgccctgggagaaaccccggttccttgtgccggcttggctatgctgatgctgggaccgggcataaccatcacccatgcggcaatactttcactggctgcctgtggctgtctggtagcctgggtgggggaacatggcgtcaggttctatgccgcaggcacaggtacaacccgtagcgccgtcaatcttatgaaacaggcaaagtactgggcagacccggttttgcatttacgggttgtgcgctccatgtatcagttgaggttccaggatgagctttctcctgatttaactttgaaccagatcaggggcaaggaaggtgcccgggtgcgcgatacatatttccaactctcccaaaagtatggtgtgcccatgcagggcagaaactatcaaagagacaactggaataaagcggatcccataaaccgggcattatctgtggcaaactcctgcctctacggcatatcgcacgctgccattgttgctgcaggattctctcccggattgggctttgtccacactggcaagcaactgtcatttgtctatgatatcgcggatctatacaaaatggaaatggctgctcccgccgcattccgggcgaccgctgaagggatcggcgaactcgaccgcagagtcaggcttgcctgccgtgatgaattccacaggcagaatctactcaaacgcattgtcgcggatattagttctctcttcggtgatattatgccagaggatagcccggatgactgttttgccgaagaaccagccttgcctggaggactctggtctccagatggagaagtttccccaggcggcatatcttacgggcaggatgatctgccaaaggaagattgatggtggttttagtattggaaaatgtgccaagctccctgaggggtaagatcacacgttggctgctggaagtaaaagccggggtgtttgtgggtaaagtctcagcaatggttagagataaactgtgggataaggttagaagcaattgcagcggtggaacttgcctgatgatctggagtagtcagaccgagcaagggtttgatatcgaattctggggtgccgcatcaagagtcgttacggaatgggagggtatcaaacttatgaccaagcatccttaaactaaggcttgaaggagttcaatgacctcttagacctctattgatcaagtgtattccccatgcatgtgggggtgaaccggatacacacgcatcggttgcataggctgtccggtattccccatgcatgtgggggtgaaccggatcacgtcaccaagatctggcttcggcacaggtattccccatgcatgtgggggtgaaccgcttatccgaatgctacaagctgcacgtgacctgtattccccatgcatgtgggggtgaaccgagacccttcaacctatcgcaaaagaattcaatgtattccccatgcatgtgggggtgaaccgactacaaaacgaggtgatcatatgagtgtcaagtattccccatgcatgtgggggtgaaccgcatctgttttgccttctgcattgccttgtatcgtattccccatgcatgtgggggtgaaccgaacgcccgccagccggcggcactgctggctatgtattccccatgcatgtgggggtgaaccgacgaatcccgtctatgccgcccaggccaacgcgtattccccatgcatgtgggggtgaaccgaaaccaggaattaacgtagtgccaggcaagacgtattccccatgcatgtgggggtgaaccgactttgacaaagccatccaggtaggtgatgccgtattccccatgcatgtgggggtgaaccgccgacgaaatagcgatgaagggactggtaacgtattccccatgcatgtgggggtgaaccggcggcggcggctttgtcggtatcctggtagaggtattccccatgcatgtgggggtgaaccgaggacgtagcgaggcggcttggtgacctgatggtattccccatgcatgtgggggtgaaccgcgcggagctttccttgttgtcaccggaaagaggtattccccatgcatgtgggggtgaaccgaattatcggaaataacaaagagtcttcaaggggtattccccatgcatgtgggggtgaaccgtcaacgaaaccagcaacctgctgatcgttggggtattccccatgcatgtgggggtgaaccgaggacgtagcgaggcggcttggtgacctgatggtattccccatgcatgtgggggtgaaccgcctgaatctatcaccctactgagacaggcaatgtattccccatgcatgtgggggtgaaccgatcgtccagattctcacgatcatcctggacatgtattccccatgcatgtgggggtgaaccgttataaagggcagtccagtgagcaatagcaaggtattccccatgcatgtgggggtgaaccgatggcaacaattagcaggaattaaacaagaaggtattccccatgcatgtgggggtgaaccgttccggatgcagtcatccgctgtcgatgtggagtattccccatgcatgtgggggtgaaccgttcatagcgccgcttttcagcctggctacggcgtattccccatgcatgtgggggtgaaccgacgcggcataaccgcatgggcagcgcgtattggtattccccacgcatgtgggggtgaaccgatcgacgccggcatcatcgaggatctgatcctgtattccccacgcatgtgggggtgttgcgatttcctcgcgcgcgggcgactctcatttgcatctggcgctcagaccttggtcttcctggggtcaaccttaacctttatatggatgacctaaggatgatggcaccaaagccagtagcagcaagggagagcggtatgaagcaatatgaggattatcacgggaattattttgaagggacaagcatccagtctgggtagtttgttggtattttgtcggttgtctaaagtggtggttttgtaattgacctgaaatcggtgtgacggggttttatggttttttgaagttcttttttgtatcggattgtaaaattttcaccctctttctatctgtgtaatttgtggttttattaaaagactggatcccgggtcaagcaagcttgcccaggatgacacagtatatagcttgggggtggtttgtttcaccattccacctttccacttctaacaattcgtgttagtttgtgtaatacagattccatattgtgacatcatatatacgagcaggtgcataactgcctcataacttcatgagtaagcgtatcaaagtaatcaacaactgccttttcaagttgtttcaaagtgtcatacagcctgttgtgcagggtatttttcttgattgttttccacagtctttcgaccgg

SEQ ID NO: 1018 - DNA, 110034 bp, Artificial Sequence
  Synthetic Oligonucleotide
  misc_feature (1)..(97888): n is a, c, g, or t
nnnnnnnnnnnnnnnnnnnnnnnnnnnnnnnnnnnnnnnnnnnnnnnnnnnnnnnnnnnnnnnnnnnnnnnnnnnnnnnnnnnnnnnnnnnnnnnnnnnnnnnnnnnnnnnnnnnnnnnnnnnnnnnnnnnnnnnnnnnnnnnnnnnnnnnnnnnnnnnnnnnnnnnnnnnnnnnnnnnnnnnnnnnnnnnnnnnnnnnnnnnnnnnnnnnnnnnnnnnnnnnnnnnnnnnnnnnnnnnnnnnnnnnnnnnnnnnnnnnnnnnnnnnnnnnnnnnnnnnnnnnnnnnnnnnnnnnnnnnnnnnnnnnnnnnnnnnnnnnnnnnnnnnnnnnnnnnnnnnnnnnnnnnnnnnnnnnnnnnnnnnnnnnnnnnnnnnnnnnnnnnnnnnnnnnnnnnnnnnnnnnnnnnnnnnnnnnnnnnnnnnnnnnnnnnnnnnnnnnnnnnnnnnnnnnnnnnnnnnnnnnnnnnnnnnnnnnnnnnnnnnnnnnnnnnnnnnnnnnnnnnnnnnnnnnnnnnnnnnnnnnnnnnnnnnnnnnnnnnnnnnnnnnnnnnnnnnnnnnnnnnnnnnnnnnnnnnnnnnnnnnnnnnnnnnnnnnnnnnnnnnnnnnnnnnnnnnnnnnnnnnnnnnnnnnnnnnnnnnnnnnnnnnnnnnnnnnnnnnnnnnnnnnnnnnnnnnnnnnnnnnnnnnnnnnnnnnnnnnnnnnnnnnnnnnnnnnnnnnnnnnnnnnnnnnnnnnnnnnnnnnnnnnnnnnnnnnnnnnnnnnnnnnnnnnnnnnnnnnnnnnnnnnnnnnnnnnnnnnnnnnnnnnnnnnnnnnnnnnnnnnnnnnnnnnnnnnnnnnnnnnnnnnnnnnnnnnnnnnnnnnnnnnnnnnnnnnnnnnnnnnnnnnnnnnnnnnnnnnnnnnnnnnnnnnnnnnnnnnnnnnnnnnnnnnnnnnnnnnnnnnnnnnnnnnnnnnnnnnnnnnnnnnnnnnnnnnnnnnnnnnnnnnnnnnnnnnnnnnnnnnnnnnnnnnnnnnnnnnnnnnnnnnnnnnnnnnnnnnnnnnnnnnnnnnnnnnnnnnnnnnnnnnnnnnnnnnnnnnnnnnnnnnnnnnnnnnnnnnnnnnnnnnnnnnnnnnnnnnnnnnnnnnnnnnnnnnnnnnnnnnnnnnnnnnnnnnnnnnnnnnnnnnnnnnnnnnnnnnnnnnnnnnnnnnnnnnnnnnnnnnnnnnnnnnnnnnnnnnnnnnnnnnnnnnnnnnnnnnnnnnnnnnnnnnnnnnnnnnnnnnnnnnnnnnnnnnnnnnnnnnnnnnnnnnnnnnnnnnnnnnnnnnnnnnnnnnnnnnnnnnnnnnnnnnnnnnnnnnnnnnnnnnnnnnnnnnnnnnnnnnnnnnnnnnnnnnnnnnnnnnnnnnnnnnnnnnnnnnnnnnnnnnnnnnnnnnnnnnnnnnnnnnnnnnnnnnnnnnnnnnnnnnnnnnnnnnnnnnnnnnnnnnnnnnnnnnnnnnnnnnnnnnnnnnnnnnnnnnnnnnnnnnnnnnnnnnnnnnnnnnnnnnnnnnnnnnnnnnnnnnnnnnnnnnnnnnnnnnnnnnnnnnnnnnnnnnnnnnnnnnnnnnnnnnnnnnnnnnnnnnnnnnnnnnnnnnnnnnnnnnnnnnnnnnnnnnnnnnnnnnnnnnnnnnnnnnnnnnnnnnnnnnnnnnnnnnnnnnnnnnnnnnnnnnnnnnnnnnnnnnnnnnnnnnnnnnnnnnnnnnnnnnnnnnnnnnnnnnnnnnnnnnnnnnnnnnnnnnnnnnnnnnnnnnnnnnnnnnnnnnnnnnnnnnnnnnnnnnnnnnnnnnnnnnnnnnnnnnnnnnnnnnnnnnnnnnnnnnnnnnnnnnnnnnnnnnnnnnnnnnnnnnnnnnnnnnnnnnnnnnnnnnnnnnnnnnnnnnnnnnnnnnnnnnnnnnnnnnnnnnnnnnnnnnnnnnnnnnnnnnnnnnnnnnnnnnnnnnnnnnnnnnnnnnnnnnnnnnnnnnnnnnnnnnnnnnnnnnnnnnnnnnnnnnnnnnnnnnnnnnnnnnnnnnnnnnnnnnnnnnnnnnnnnnnnnnnnnnnnnnnnnnnnnnnnnnnnnnnnnnnnnnnnnnnnnnnnnnnnnnnnnnnnnnnnnnnnnnnnnnnnnnnnnnnnnnnnnnnnnnnnnnnnnnnnnnnnnnnnnnnnnnnnnnnnnnnnnnnnnnnnnnnnnnnnnnnnnnnnnnnnnnnnnnnnnnnnnnnnnnnnnnnnnnnnnnnnnnnnnnnnnnnnnnnnnnnnnnnnnnnnnnnnnnnnnnnnnnnnnnnnnnnnnnnnnnnnnnnnnnnnnnnnnnnnnnnnnnnnnnnnnnnnnnnnnnnnnnnnnnnnnnnnnnnnnnnnnnnnnnnnnnnnnnnnnnnnnnnnnnnnnnnnnnnnnnnnnnnnnnnnnnnnnnnnnnnnnnnnnnnnnnnnnnnnnnnnnnnnnnnnnnnnnnnnnnnnnnnnnnnnnnnnnnnnnnnnnnnnnnnnnnnnnnnnnnnnnnnnnnnnnnnnnnnnnnnnnnnnnnnnnnnnnnnnnnnnnnnnnnnnnnnnnnnnnnnnnnnnnnnnnnnnnnnnnnnnnnnnnnnnnnnnnnnnnnnnnnnnnnnnnnnnnnnnnnnnnnnnnnnnnnnnnnnnnnnnnnnnnnnnnnnnnnnnnnnnnnnnnnnnnnnnnnnnnnnnnnnnnnnnnnnnnnnnnnnnnnnnnnnnnnnnnnnnnnnnnnnnnnnnnnnnnnnnnnnnnnnnnnnnnnnnnnnnnnnnnnnnnnnnnnnnnnnnnnnnnnnnnnnnnnnnnnnnnnnnnnnnnnnnnnnnnnnnnnnnnnnnnnnnnnnnnnnnnnnnnnnnnnnnnnnnnnnnnnnnnnnnnnnnnnnnnnnnnnnnnnnnnnnnnnnnnnnnnnnnnnnnnnnnnnnnnnnnnnnnnnnnnnnnnnnnnnnnnnnnnnnnnnnnnnnnnnnnnnnnnnnnnnnnnnnnnnnnnnnnnnnnnnnnnnnnnnnnnnnnnnnnnnnnnnnnnnnnnnnnnnnnnnnnnnnnnnnnnnnnnnnnnnnnnnnnnnnnnnnnnnnnnnnnnnnnnnnnnnnnnnnnnnnnnnnnnnnnnnnnnnnnnnnnnnnnnnnnnnnnnnnnnnnnnnnnnnnnnnnnnnnnnnnnnnnnnnnnnnnnnnnnnnnnnnnnnnnnnnnnnnnnnnnnnnnnnnnnnnnnnnnnnnnnnnnnnnnnnnnnnnnnnnnnnnnnnnnnnnnnnnnnnnnnnnnnnnnnnnnnnnnnnnnnnnnnnnnnnnnnnnnnnnnnnnnnnnnnnnnnnnnnnnnnnnnnnnnnnnnnnnnnnnnnnnnnnnnnnnnnnnnnnnnnnnnnnnnnnnnnnnnnnnnnnnnnnnnnnnnnnnnnnnnnnnnnnnnnnnnnnnnnnnnnnnnnnnnnnnnnnnnnnnnnnnnnnnnnnnnnnnnnnnnnnnnnnnnnnnnnnnnnnnnnnnnnnnnnnnnnnnnnnnnnnnnnnnnnnnnnnnnnnnnnnnnnnnnnnnnnnnnnnnnnnnnnnnnnnnnnnnnnnnnnnnnnnnnnnnnnnnnnnnnnnnnnnnnnnnnnnnnnnnnnnnnnnnnnnnnnnnnnnnnnnnnnnnnnnnnnnnnnnnnnnnnnnnnnnnnnnnnnnnnnnnnnnnnnnnnnnnnnnnnnnnnnnnnnnnnnnnnnnnnnnnnnnnnnnnnnnnnnnnnnnnnnnnnnnnnnnnnnnnnnnnnnnnnnnnnnnnnnnnnnnnnnnnnnnnnnnnnnnnnnnnnnnnnnnnnnnnnnnnnnnnnnnnnnnnnnnnnnnnnnnnnnnnnnnnnnnnnnnnnnnnnnnnnnnnnnnnnnnnnnnnnnnnnnnnnnnnnnnnnnnnnnnnnnnnnnnnnnnnnnnnnnnnnnnnnnnnnnnnnnnnnnnnnnnnnnnnnnnnnnnnnnnnnnnnnnnnnnnnnnnnnnnnnnnnnnnnnnnnnnnnnnnnnnnnnnnnnnnnnnnnnnnnnnnnnnnnnnnnnnnnnnnnnnnnnnnnnnnnnnnnnnnnnnnnnnnnnnnnnnnnnnnnnnnnnnnnnnnnnnnnnnnnnnnnnnnnnnnnnnnnnnnnnnnnnnnnnnnnnnnnnnnnnnnnnnnnnnnnnnnnnnnnnnnnnnnnnnnnnnnnnnnnnnnnnnnnnnnnnnnnnnnnnnnnnnnnnnnnnnnnnnnnnnnnnnnnnnnnnnnnnnnnnnnnnnnnnnnnnnnnnnnnnnnnnnnnnnnnnnnnnnnnnnnnnnnnnnnnnnnnnnnnnnnnnnnnnnnnnnnnnnnnnnnnnnnnnnnnnnnnnnnnnnnnnnnnnnnnnnnnnnnnnnnnnnnnnnnnnnnnnnnnnnnnnnnnnnnnnnnnnnnnnnnnnnnnnnnnnnnnnnnnnnnnnnnnnnnnnnnnnnnnnnnnnnnnnnnnnnnnnnnnnnnnnnnnnnnnnnnnnnnnnnnnnnnnnnnnnnnnnnnnnnnnnnnnnnnnnnnnnnnnnnnnnnnnnnnnnnnnnnnnnnnnnnnnnnnnnnnnnnnnnnnnnnnnnnnnnnnnnnnnnnnnnnnnnnnnnnnnnnnnnnnnnnnnnnnnnnnnnnnnnnnnnnnnnnnnnnnnnnnnnnnnnnnnnnnnnnnnnnnnnnnnnnnnnnnnnnnnnnnnnnnnnnnnnnnnnnnnnnnnnnnnnnnnnnnnnnnnnnnnnnnnnnnnnnnnnnnnnnnnnnnnnnnnnnnnnnnnnnnnnnnnnnnnnnnnnnnnnnnnnnnnnnnnnnnnnnnnnnnnnnnnnnnnnnnnnnnnnnnnnnnnnnnnnnnnnnnnnnnnnnnnnnnnnnnnnnnnnnnnnnnnnnnnnnnnnnnnnnnnnnnnnnnnnnnnnnnnnnnnnnnnnnnnnnnnnnnnnnnnnnnnnnnnnnnnnnnnnnnnnnnnnnnnnnnnnnnnnnnnnnnnnnnnnnnnnnnnnnnnnnnnnnnnnnnnnnnnnnnnnnnnnnnnnnnnnnnnnnnnnnnnnnnnnnnnnnnnnnnnnnnnnnnnnnnnnnnnnnnnnnnnnnnnnnnnnnnnnnnnnnnnnnnnnnnnnnnnnnnnnnnnnnnnnnnnnnnnnnnnnnnnnnnnnnnnnnnnnnnnnnnnnnnnnnnnnnnnnnnnnnnnnnnnnnnnnnnnnnnnnnnnnnnnnnnnnnnnnnnnnnnnnnnnnnnnnnnnnnnnnnnnnnnnnnnnnnnnnnnnnnnnnnnnnnnnnnnnnnnnnnnnnnnnnnnnnnnnnnnnnnnnnnnnnnnnnnnnnnnnnnnnnnnnnnnnnnnnnnnnnnnnnnnnnnnnnnnnnnnnnnnnnnnnnnnnnnnnnnnnnnnnnnnnnnnnnnnnnnnnnnnnnnnnnnnnnnnnnnnnnnnnnnnnnnnnnnnnnnnnnnnnnnnnnnnnnnnnnnnnnnnnnnnnnnnnnnnnnnnnnnnnnnnnnnnnnnnnnnnnnnnnnnnnnnnnnnnnnnnnnnnnnnnnnnnnnnnnnnnnnnnnnnnnnnnnnnnnnnnnnnnnnnnnnnnnnnnnnnnnnnnnnnnnnnnnnnnnnnnnnnnnnnnnnnnnnnnnnnnnnnnnnnnnnnnnnnnnnnnnnnnnnnnnnnnnnnnnnnnnnnnnnnnnnnnnnnnnnnnnnnnnnnnnnnnnnnnnnnnnnnnnnnnnnnnnnnnnnnnnnnnnnnnnnnnnnnnnnnnnnnnnnnnnnnnnnnnnnnnnnnnnnnnnnnnnnnnnnnnnnnnnnnnnnnnnnnnnnnnnnnnnnnnnnnnnnnnnnnnnnnnnnnnnnnnnnnnnnnnnnnnnnnnnnnnnnnnnnnnnnnnnnnnnnnnnnnnnnnnnnnnnnnnnnnnnnnnnnnnnnnnnnnnnnnnnnnnnnnnnnnnnnnnnnnnnnnnnnnnnnnnnnnnnnnnnnnnnnnnnnnnnnnnnnnnnnnnnnnnnnnnnnnnnnnnnnnnnnnnnnnnnnnnnnnnnnnnnnnnnnnnnnnnnnnnnnnnnnnnnnnnnnnnnnnnnnnnnnnnnnnnnnnnnnnnnnnnnnnnnnnnnnnnnnnnnnnnnnnnnnnnnnnnnnnnnnnnnnnnnnnnnnnnnnnnnnnnnnnnnnnnnnnnnnnnnnnnnnnnnnnnnnnnnnnnnnnnnnnnnnnnnnnnnnnnnnnnnnnnnnnnnnnnnnnnnnnnnnnnnnnnnnnnnnnnnnnnnnnnnnnnnnnnnnnnnnnnnnnnnnnnnnnnnnnnnnnnnnnnnnnnnnnnnnnnnnnnnnnnnnnnnnnnnnnnnnnnnnnnnnnnnnnnnnnnnnnnnnnnnnnnnnnnnnnnnnnnnnnnnnnnnnnnnnnnnnnnnnnnnnnnnnnnnnnnnnnnnnnnnnnnnnnnnnnnnnnnnnnnnnnnnnnnnnnnnnnnnnnnnnnnnnnnnnnnnnnnnnnnnnnnnnnnnnnnnnnnnnnnnnnnnnnnnnnnnnnnnnnnnnnnnnnnnnnnnnnnnnnnnnnnnnnnnnnnnnnnnnnnnnnnnnnnnnnnnnnnnnnnnnnnnnnnnnnnnnnnnnnnnnnnnnnnnnnnnnnnnnnnnnnnnnnnnnnnnnnnnnnnnnnnnnnnnnnnnnnnnnnnnnnnnnnnnnnnnnnnnnnnnnnnnnnnnnnnnnnnnnnnnnnnnnnnnnnnnnnnnnnnnnnnnnnnnnnnnnnnnnnnnnnnnnnnnnnnnnnnnnnnnnnnnnnnnnnnnnnnnnnnnnnnnnnnnnnnnnnnnnnnnnnnnnnnnnnnnnnnnnnnnnnnnnnnnnnnnnnnnnnnnnnnnnnnnnnnnnnnnnnnnnnnnnnnnnnnnnnnnnnnnnnnnnnnnnnnnnnnnnnnnnnnnnnnnnnnnnnnnnnnnnnnnnnnnnnnnnnnnnnnnnnnnnnnnnnnnnnnnnnnnnnnnnnnnnnnnnnnnnnnnnnnnnnnnnnnnnnnnnnnnnnnnnnnnnnnnnnnnnnnnnnnnnnnnnnnnnnnnnnnnnnnnnnnnnnnnnnnnnnnnnnnnnnnnnnnnnnnnnnnnnnnnnnnnnnnnnnnnnnnnnnnnnnnnnnnnnnnnnnnnnnnnnnnnnnnnnnnnnnnnnnnnnnnnnnnnnnnnnnnnnnnnnnnnnnnnnnnnnnnnnnnnnnnnnnnnnnnnnnnnnnnnnnnnnnnnnnnnnnnnnnnnnnnnnnnnnnnnnnnnnnnnnnnnnnnnnnnnnnnnnnnnnnnnnnnnnnnnnnnnnnnnnnnnnnnnnnnnnnnnnnnnnnnnnnnnnnnnnnnnnnnnnnnnnnnnnnnnnnnnnnnnnnnnnnnnnnnnnnnnnnnnnnnnnnnnnnnnnnnnnnnnnnnnnnnnnnnnnnnnnnnnnnnnnnnnnnnnnnnnnnnnnnnnnnnnnnnnnnnnnnnnnnnnnnnnnnnnnnnnnnnnnnnnnnnnnnnnnnnnnnnnnnnnnnnnnnnnnnnnnnnnnnnnnnnnnnnnnnnnnnnnnnnnnnnnnnnnnnnnnnnnnnnnnnnnnnnnnnnnnnnnnnnnnnnnnnnnnnnnnnnnnnnnnnnnnnnnnnnnnnnnnnnnnnnnnnnnnnnnnnnnnnnnnnnnnnnnnnnnnnnnnnnnnnnnnnnnnnnnnnnnnnnnnnnnnnnnnnnnnnnnnnnnnnnnnnnnnnnnnnnnnnnnnnnnnnnnnnnnnnnnnnnnnnnnnnnnnnnnnnnnnnnnnnnnnnnnnnnnnnnnnnnnnnnnnnnnnnnnnnnnnnnnnnnnnnnnnnnnnnnnnnnnnnnnnnnnnnnnnnnnnnnnnnnnnnnnnnnnnnnnnnnnnnnnnnnnnnnnnnnnnnnnnnnnnnnnnnnnnnnnnnnnnnnnnnnnnnnnnnnnnnnnnnnnnnnnnnnnnnnnnnnnnnnnnnnnnnnnnnnnnnnnnnnnnnnnnnnnnnnnnnnnnnnnnnnnnnnnnnnnnnnnnnnnnnnnnnnnnnnnnnnnnnnnnnnnnnnnnnnnnnnnnnnnnnnnnnnnnnnnnnnnnnnnnnnnnnnnnnnnnnnnnnnnnnnnnnnnnnnnnnnnnnnnnnnnnnnnnnnnnnnnnnnnnnnnnnnnnnnnnnnnnnnnnnnnnnnnnnnnnnnnnnnnnnnnnnnnnnnnnnnnnnnnnnnnnnnnnnnnnnnnnnnnnnnnnnnnnnnnnnnnnnnnnnnnnnnnnnnnnnnnnnnnnnnnnnnnnnnnnnnnnnnnnnnnnnnnnnnnnnnnnnnnnnnnnnnnnnnnnnnnnnnnnnnnnnnnnnnnnnnnnnnnnnnnnnnnnnnnnnnnnnnnnnnnnnnnnnnnnnnnnnnnnnnnnnnnnnnnnnnnnnnnnnnnnnnnnnnnnnnnnnnnnnnnnnnnnnnnnnnnnnnnnnnnnnnnnnnnnnnnnnnnnnnnnnnnnnnnnnnnnnnnnnnnnnnnnnnnnnnnnnnnnnnnnnnnnnnnnnnnnnnnnnnnnnnnnnnnnnnnnnnnnnnnnnnnnnnnnnnnnnnnnnnnnnnnnnnnnnnnnnnnnnnnnnnnnnnnnnnnnnnnnnnnnnnnnnnnnnnnnnnnnnnnnnnnnnnnnnnnnnnnnnnnnnnnnnnnnnnnnnnnnnnnnnnnnnnnnnnnnnnnnnnnnnnnnnnnnnnnnnnnnnnnnnnnnnnnnnnnnnnnnnnnnnnnnnnnnnnnnnnnnnnnnnnnnnnnnnnnnnnnnnnnnnnnnnnnnnnnnnnnnnnnnnnnnnnnnnnnnnnnnnnnnnnnnnnnnnnnnnnnnnnnnnnnnnnnnnnnnnnnnnnnnnnnnnnnnnnnnnnnnnnnnnnnnnnnnnnnnnnnnnnnnnnnnnnnnnnnnnnnnnnnnnnnnnnnnnnnnnnnnnnnnnnnnnnnnnnnnnnnnnnnnnnnnnnnnnnnnnnnnnnnnnnnnnnnnnnnnnnnnnnnnnnnnnnnnnnnnnnnnnnnnnnnnnnnnnnnnnnnnnnnnnnnnnnnnnnnnnnnnnnnnnnnnnnnnnnnnnnnnnnnnnnnnnnnnnnnnnnnnnnnnnnnnnnnnnnnnnnnnnnnnnnnnnnnnnnnnnnnnnnnnnnnnnnnnnnnnnnnnnnnnnnnnnnnnnnnnnnnnnnnnnnnnnnnnnnnnnnnnnnnnnnnnnnnnnnnnnnnnnnnnnnnnnnnnnnnnnnnnnnnnnnnnnnnnnnnnnnnnnnnnnnnnnnnnnnnnnnnnnnnnnnnnnnnnnnnnnnnnnnnnnnnnnnnnnnnnnnnnnnnnnnnnnnnnnnnnnnnnnnnnnnnnnnnnnnnnnnnnnnnnnnnnnnnnnnnnnnnnnnnnnnnnnnnnnnnnnnnnnnnnnnnnnnnnnnnnnnnnnnnnnnnnnnnnnnnnnnnnnnnnnnnnnnnnnnnnnnnnnnnnnnnnnnnnnnnnnnnnnnnnnnnnnnnnnnnnnnnnnnnnnnnnnnnnnnnnnnnnnnnnnnnnnnnnnnnnnnnnnnnnnnnnnnnnnnnnnnnnnnnnnnnnnnnnnnnnnnnnnnnnnnnnnnnnnnnnnnnnnnnnnnnnnnnnnnnnnnnnnnnnnnnnnnnnnnnnnnnnnnnnnnnnnnnnnnnnnnnnnnnnnnnnnnnnnnnnnnnnnnnnnnnnnnnnnnnnnnnnnnnnnnnnnnnnnnnnnnnnnnnnnnnnnnnnnnnnnnnnnnnnnnnnnnnnnnnnnnnnnnnnnnnnnnnnnnnnnnnnnnnnnnnnnnnnnnnnnnnnnnnnnnnnnnnnnnnnnnnnnnnnnnnnnnnnnnnnnnnnnnnnnnnnnnnnnnnnnnnnnnnnnnnnnnnnnnnnnnnnnnnnnnnnnnnnnnnnnnnnnnnnnnnnnnnnnnnnnnnnnnnnnnnnnnnnnnnnnnnnnnnnnnnnnnnnnnnnnnnnnnnnnnnnnnnnnnnnnnnnnnnnnnnnnnnnnnnnnnnnnnnnnnnnnnnnnnnnnnnnnnnnnnnnnnnnnnnnnnnnnnnnnnnnnnnnnnnnnnnnnnnnnnnnnnnnnnnnnnnnnnnnnnnnnnnnnnnnnnnnnnnnnnnnnnnnnnnnnnnnnnnnnnnnnnnnnnnnnnnnnnnnnnnnnnnnnnnnnnnnnnnnnnnnnnnnnnnnnnnnnnnnnnnnnnnnnnnnnnnnnnnnnnnnnnnnnnnnnnnnnnnnnnnnnnnnnnnnnnnnnnnnnnnnnnnnnnnnnnnnnnnnnnnnnnnnnnnnnnnnnnnnnnnnnnnnnnnnnnnnnnnnnnnnnnnnnnnnnnnnnnnnnnnnnnnnnnnnnnnnnnnnnnnnnnnnnnnnnnnnnnnnnnnnnnnnnnnnnnnnnnnnnnnnnnnnnnnnnnnnnnnnnnnnnnnnnnnnnnnnnnnnnnnnnnnnnnnnnnnnnnnnnnnnnnnnnnnnnnnnnnnnnnnnnnnnnnnnnnnnnnnnnnnnnnnnnnnnnnnnnnnnnnnnnnnnnnnnnnnnnnnnnnnnnnnnnnnnnnnnnnnnnnnnnnnnnnnnnnnnnnnnnnnnnnnnnnnnnnnnnnnnnnnnnnnnnnnnnnnnnnnnnnnnnnnnnnnnnnnnnnnnnnnnnnnnnnnnnnnnnnnnnnnnnnnnnnnnnnnnnnnnnnnnnnnnnnnnnnnnnnnnnnnnnnnnnnnnnnnnnnnnnnnnnnnnnnnnnnnnnnnnnnnnnnnnnnnnnnnnnnnnnnnnnnnnnnnnnnnnnnnnnnnnnnnnnnnnnnnnnnnnnnnnnnnnnnnnnnnnnnnnnnnnnnnnnnnnnnnnnnnnnnnnnnnnnnnnnnnnnnnnnnnnnnnnnnnnnnnnnnnnnnnnnnnnnnnnnnnnnnnnnnnnnnnnnnnnnnnnnnnnnnnnnnnnnnnnnnnnnnnnnnnnnnnnnnnnnnnnnnnnnnnnnnnnnnnnnnnnnnnnnnnnnnnnnnnnnnnnnnnnnnnnnnnnnnnnnnnnnnnnnnnnnnnnnnnnnnnnnnnnnnnnnnnnnnnnnnnnnnnnnnnnnnnnnnnnnnnnnnnnnnnnnnnnnnnnnnnnnnnnnnnnnnnnnnnnnnnnnnnnnnnnnnnnnnnnnnnnnnnnnnnnnnnnnnnnnnnnnnnnnnnnnnnnnnnnnnnnnnnnnnnnnnnnnnnnnnnnnnnnnnnnnnnnnnnnnnnnnnnnnnnnnnnnnnnnnnnnnnnnnnnnnnnnnnnnnnnnnnnnnnnnnnnnnnnnnnnnnnnnnnnnnnnnnnnnnnnnnnnnnnnnnnnnnnnnnnnnnnnnnnnnnnnnnnnnnnnnnnnnnnnnnnnnnnnnnnnnnnnnnnnnnnnnnnnnnnnnnnnnnnnnnnnnnnnnnnnnnnnnnnnnnnnnnnnnnnnnnnnnnnnnnnnnnnnnnnnnnnnnnnnnnnnnnnnnnnnnnnnnnnnnnnnnnnnnnnnnnnnnnnnnnnnnnnnnnnnnnnnnnnnnnnnnnnnnnnnnnnnnnnnnnnnnnnnnnnnnnnnnnnnnnnnnnnnnnnnnnnnnnnnnnnnnnnnnnnnnnnnnnnnnnnnnnnnnnnnnnnnnnnnnnnnnnnnnnnnnnnnnnnnnnnnnnnnnnnnnnnnnnnnnnnnnnnnnnnnnnnnnnnnnnnnnnnnnnnnnnnnnnnnnnnnnnnnnnnnnnnnnnnnnnnnnnnnnnnnnnnnnnnnnnnnnnnnnnnnnnnnnnnnnnnnnnnnnnnnnnnnnnnnnnnnnnnnnnnnnnnnnnnnnnnnnnnnnnnnnnnnnnnnnnnnnnnnnnnnnnnnnnnnnnnnnnnnnnnnnnnnnnnnnnnnnnnnnnnnnnnnnnnnnnnnnnnnnnnnnnnnnnnnnnnnnnnnnnnnnnnnnnnnnnnnnnnnnnnnnnnnnnnnnnnnnnnnnnnnnnnnnnnnnnnnnnnnnnnnnnnnnnnnnnnnnnnnnnnnnnnnnnnnnnnnnnnnnnnnnnnnnnnnnnnnnnnnnnnnnnnnnnnnnnnnnnnnnnnnnnnnnnnnnnnnnnnnnnnnnnnnnnnnnnnnnnnnnnnnnnnnnnnnnnnnnnnnnnnnnnnnnnnnnnnnnnnnnnnnnnnnnnnnnnnnnnnnnnnnnnnnnnnnnnnnnnnnnnnnnnnnnnnnnnnnnnnnnnnnnnnnnnnnnnnnnnnnnnnnnnnnnnnnnnnnnnnnnnnnnnnnnnnnnnnnnnnnnnnnnnnnnnnnnnnnnnnnnnnnnnnnnnnnnnnnnnnnnnnnnnnnnnnnnnnnnnnnnnnnnnnnnnnnnnnnnnnnnnnnnnnnnnnnnnnnnnnnnnnnnnnnnnnnnnnnnnnnnnnnnnnnnnnnnnnnnnnnnnnnnnnnnnnnnnnnnnnnnnnnnnnnnnnnnnnnnnnnnnnnnnnnnnnnnnnnnnnnnnnnnnnnnnnnnnnnnnnnnnnnnnnnnnnnnnnnnnnnnnnnnnnnnnnnnnnnnnnnnnnnnnnnnnnnnnnnnnnnnnnnnnnnnnnnnnnnnnnnnnnnnnnnnnnnnnnnnnnnnnnnnnnnnnnnnnnnnnnnnnnnnnnnnnnnnnnnnnnnnnnnnnnnnnnnnnnnnnnnnnnnnnnnnnnnnnnnnnnnnnnnnnnnnnnnnnnnnnnnnnnnnnnnnnnnnnnnnnnnnnnnnnnnnnnnnnnnnnnnnnnnnnnnnnnnnnnnnnnnnnnnnnnnnnnnnnnnnnnnnnnnnnnnnnnnnnnnnnnnnnnnnnnnnnnnnnnnnnnnnnnnnnnnnnnnnnnnnnnnnnnnnnnnnnnnnnnnnnnnnnnnnnnnnnnnnnnnnnnnnnnnnnnnnnnnnnnnnnnnnnnnnnnnnnnnnnnnnnnnnnnnnnnnnnnnnnnnnnnnnnnnnnnnnnnnnnnnnnnnnnnnnnnnnnnnnnnnnnnnnnnnnnnnnnnnnnnnnnnnnnnnnnnnnnnnnnnnnnnnnnnnnnnnnnnnnnnnnnnnnnnnnnnnnnnnnnnnnnnnnnnnnnnnnnnnnnnnnnnnnnnnnnnnnnnnnnnnnnnnnnnnnnnnnnnnnnnnnnnnnnnnnnnnnnnnnnnnnnnnnnnnnnnnnnnnnnnnnnnnnnnnnnnnnnnnnnnnnnnnnnnnnnnnnnnnnnnnnnnnnnnnnnnnnnnnnnnnnnnnnnnnnnnnnnnnnnnnnnnnnnnnnnnnnnnnnnnnnnnnnnnnnnnnnnnnnnnnnnnnnnnnnnnnnnnnnnnnnnnnnnnnnnnnnnnnnnnnnnnnnnnnnnnnnnnnnnnnnnnnnnnnnnnnnnnnnnnnnnnnnnnnnnnnnnnnnnnnnnnnnnnnnnnnnnnnnnnnnnnnnnnnnnnnnnnnnnnnnnnnnnnnnnnnnnnnnnnnnnnnnnnnnnnnnnnnnnnnnnnnnnnnnnnnnnnnnnnnnnnnnnnnnnnnnnnnnnnnnnnnnnnnnnnnnnnnnnnnnnnnnnnnnnnnnnnnnnnnnnnnnnnnnnnnnnnnnnnnnnnnnnnnnnnnnnnnnnnnnnnnnnnnnnnnnnnnnnnnnnnnnnnnnnnnnnnnnnnnnnnnnnnnnnnnnnnnnnnnnnnnnnnnnnnnnnnnnnnnnnnnnnnnnnnnnnnnnnnnnnnnnnnnnnnnnnnnnnnnnnnnnnnnnnnnnnnnnnnnnnnnnnnnnnnnnnnnnnnnnnnnnnnnnnnnnnnnnnnnnnnnnnnnnnnnnnnnnnnnnnnnnnnnnnnnnnnnnnnnnnnnnnnnnnnnnnnnnnnnnnnnnnnnnnnnnnnnnnnnnnnnnnnnnnnnnnnnnnnnnnnnnnnnnnnnnnnnnnnnnnnnnnnnnnnnnnnnnnnnnnnnnnnnnnnnnnnnnnnnnnnnnnnnnnnnnnnnnnnnnnnnnnnnnnnnnnnnnnnnnnnnnnnnnnnnnnnnnnnnnnnnnnnnnnnnnnnnnnnnnnnnnnnnnnnnnnnnnnnnnnnnnnnnnnnnnnnnnnnnnnnnnnnnnnnnnnnnnnnnnnnnnnnnnnnnnnnnnnnnnnnnnnnnnnnnnnnnnnnnnnnnnnnnnnnnnnnnnnnnnnnnnnnnnnnnnnnnnnnnnnnnnnnnnnnnnnnnnnnnnnnnnnnnnnnnnnnnnnnnnnnnnnnnnnnnnnnnnnnnnnnnnnnnnnnnnnnnnnnnnnnnnnnnnnnnnnnnnnnnnnnnnnnnnnnnnnnnnnnnnnnnnnnnnnnnnnnnnnnnnnnnnnnnnnnnnnnnnnnnnnnnnnnnnnnnnnnnnnnnnnnnnnnnnnnnnnnnnnnnnnnnnnnnnnnnnnnnnnnnnnnnnnnnnnnnnnnnnnnnnnnnnnnnnnnnnnnnnnnnnnnnnnnnnnnnnnnnnnnnnnnnnnnnnnnnnnnnnnnnnnnnnnnnnnnnnnnnnnnnnnnnnnnnnnnnnnnnnnnnnnnnnnnnnnnnnnnnnnnnnnnnnnnnnnnnnnnnnnnnnnnnnnnnnnnnnnnnnnnnnnnnnnnnnnnnnnnnnnnnnnnnnnnnnnnnnnnnnnnnnnnnnnnnnnnnnnnnnnnnnnnnnnnnnnnnnnnnnnnnnnnnnnnnnnnnnnnnnnnnnnnnnnnnnnnnnnnnnnnnnnnnnnnnnnnnnnnnnnnnnnnnnnnnnnnnnnnnnnnnnnnnnnnnnnnnnnnnnnnnnnnnnnnnnnnnnnnnnnnnnnnnnnnnnnnnnnnnnnnnnnnnnnnnnnnnnnnnnnnnnnnnnnnnnnnnnnnnnnnnnnnnnnnnnnnnnnnnnnnnnnnnnnnnnnnnnnnnnnnnnnnnnnnnnnnnnnnnnnnnnnnnnnnnnnnnnnnnnnnnnnnnnnnnnnnnnnnnnnnnnnnnnnnnnnnnnnnnnnnnnnnnnnnnnnnnnnnnnnnnnnnnnnnnnnnnnnnnnnnnnnnnnnnnnnnnnnnnnnnnnnnnnnnnnnnnnnnnnnnnnnnnnnnnnnnnnnnnnnnnnnnnnnnnnnnnnnnnnnnnnnnnnnnnnnnnnnnnnnnnnnnnnnnnnnnnnnnnnnnnnnnnnnnnnnnnnnnnnnnnnnnnnnnnnnnnnnnnnnnnnnnnnnnnnnnnnnnnnnnnnnnnnnnnnnnnnnnnnnnnnnnnnnnnnnnnnnnnnnnnnnnnnnnnnnnnnnnnnnnnnnnnnnnnnnnnnnnnnnnnnnnnnnnnnnnnnnnnnnnnnnnnnnnnnnnnnnnnnnnnnnnnnnnnnnnnnnnnnnnnnnnnnnnnnnnnnnnnnnnnnnnnnnnnnnnnnnnnnnnnnnnnnnnnnnnnnnnnnnnnnnnnnnnnnnnnnnnnnnnnnnnnnnnnnnnnnnnnnnnnnnnnnnnnnnnnnnnnnnnnnnnnnnnnnnnnnnnnnnnnnnnnnnnnnnnnnnnnnnnnnnnnnnnnnnnnnnnnnnnnnnnnnnnnnnnnnnnnnnnnnnnnnnnnnnnnnnnnnnnnnnnnnnnnnnnnnnnnnnnnnnnnnnnnnnnnnnnnnnnnnnnnnnnnnnnnnnnnnnnnnnnnnnnnnnnnnnnnnnnnnnnnnnnnnnnnnnnnnnnnnnnnnnnnnnnnnnnnnnnnnnnnnnnnnnnnnnnnnnnnnnnnnnnnnnnnnnnnnnnnnnnnnnnnnnnnnnnnnnnnnnnnnnnnnnnnnnnnnnnnnnnnnnnnnnnnnnnnnnnnnnnnnnnnnnnnnnnnnnnnnnnnnnnnnnnnnnnnnnnnnnnnnnnnnnnnnnnnnnnnnnnnnnnnnnnnnnnnnnnnnnnnnnnnnnnnnnnnnnnnnnnnnnnnnnnnnnnnnnnnnnnnnnnnnnnnnnnnnnnnnnnnnnnnnnnnnnnnnnnnnnnnnnnnnnnnnnnnnnnnnnnnnnnnnnnnnnnnnnnnnnnnnnnnnnnnnnnnnnnnnnnnnnnnnnnnnnnnnnnnnnnnnnnnnnnnnnnnnnnnnnnnnnnnnnnnnnnnnnnnnnnnnnnnnnnnnnnnnnnnnnnnnnnnnnnnnnnnnnnnnnnnnnnnnnnnnnnnnnnnnnnnnnnnnnnnnnnnnnnnnnnnnnnnnnnnnnnnnnnnnnnnnnnnnnnnnnnnnnnnnnnnnnnnnnnnnnnnnnnnnnnnnnnnnnnnnnnnnnnnnnnnnnnnnnnnnnnnnnnnnnnnnnnnnnnnnnnnnnnnnnnnnnnnnnnnnnnnnnnnnnnnnnnnnnnnnnnnnnnnnnnnnnnnnnnnnnnnnnnnnnnnnnnnnnnnnnnnnnnnnnnnnnnnnnnnnnnnnnnnnnnnnnnnnnnnnnnnnnnnnnnnnnnnnnnnnnnnnnnnnnnnnnnnnnnnnnnnnnnnnnnnnnnnnnnnnnnnnnnnnnnnnnnnnnnnnnnnnnnnnnnnnnnnnnnnnnnnnnnnnnnnnnnnnnnnnnnnnnnnnnnnnnnnnnnnnnnnnnnnnnnnnnnnnnnnnnnnnnnnnnnnnnnnnnnnnnnnnnnnnnnnnnnnnnnnnnnnnnnnnnnnnnnnnnnnnnnnnnnnnnnnnnnnnnnnnnnnnnnnnnnnnnnnnnnnnnnnnnnnnnnnnnnnnnnnnnnnnnnnnnnnnnnnnnnnnnnnnnnnnnnnnnnnnnnnnnnnnnnnnnnnnnnnnnnnnnnnnnnnnnnnnnnnnnnnnnnnnnnnnnnnnnnnnnnnnnnnnnnnnnnnnnnnnnnnnnnnnnnnnnnnnnnnnnnnnnnnnnnnnnnnnnnnnnnnnnnnnnnnnnnnnnnnnnnnnnnnnnnnnnnnnnnnnnnnnnnnnnnnnnnnnnnnnnnnnnnnnnnnnnnnnnnnnnnnnnnnnnnnnnnnnnnnnnnnnnnnnnnnnnnnnnnnnnnnnnnnnnnnnnnnnnnnnnnnnnnnnnnnnnnnnnnnnnnnnnnnnnnnnnnnnnnnnnnnnnnnnnnnnnnnnnnnnnnnnnnnnnnnnnnnnnnnnnnnnnnnnnnnnnnnnnnnnnnnnnnnnnnnnnnnnnnnnnnnnnnnnnnnnnnnnnnnnnnnnnnnnnnnnnnnnnnnnnnnnnnnnnnnnnnnnnnnnnnnnnnnnnnnnnnnnnnnnnnnnnnnnnnnnnnnnnnnnnnnnnnnnnnnnnnnnnnnnnnnnnnnnnnnnnnnnnnnnnnnnnnnnnnnnnnnnnnnnnnnnnnnnnnnnnnnnnnnnnnnnnnnnnnnnnnnnnnnnnnnnnnnnnnnnnnnnnnnnnnnnnnnnnnnnnnnnnnnnnnnnnnnnnnnnnnnnnnnnnnnnnnnnnnnnnnnnnnnnnnnnnnnnnnnnnnnnnnnnnnnnnnnnnnnnnnnnnnnnnnnnnnnnnnnnnnnnnnnnnnnnnnnnnnnnnnnnnnnnnnnnnnnnnnnnnnnnnnnnnnnnnnnnnnnnnnnnnnnnnnnnnnnnnnnnnnnnnnnnnnnnnnnnnnnnnnnnnnnnnnnnnnnnnnnnnnnnnnnnnnnnnnnnnnnnnnnnnnnnnnnnnnnnnnnnnnnnnnnnnnnnnnnnnnnnnnnnnnnnnnnnnnnnnnnnnnnnnnnnnnnnnnnnnnnnnnnnnnnnnnnnnnnnnnnnnnnnnnnnnnnnnnnnnnnnnnnnnnnnnnnnnnnnnnnnnnnnnnnnnnnnnnnnnnnnnnnnnnnnnnnnnnnnnnnnnnnnnnnnnnnnnnnnnnnnnnnnnnnnnnnnnnnnnnnnnnnnnnnnnnnnnnnnnnnnnnnnnnnnnnnnnnnnnnnnnnnnnnnnnnnnnnnnnnnnnnnnnnnnnnnnnnnnnnnnnnnnnnnnnnnnnnnnnnnnnnnnnnnnnnnnnnnnnnnnnnnnnnnnnnnnnnnnnnnnnnnnnnnnnnnnnnnnnnnnnnnnnnnnnnnnnnnnnnnnnnnnnnnnnnnnnnnnnnnnnnnnnnnnnnnnnnnnnnnnnnnnnnnnnnnnnnnnnnnnnnnnnnnnnnnnnnnnnnnnnnnnnnnnnnnnnnnnnnnnnnnnnnnnnnnnnnnnnnnnnnnnnnnnnnnnnnnnnnnnnnnnnnnnnnnnnnnnnnnnnnnnnnnnnnnnnnnnnnnnnnnnnnnnnnnnnnnnnnnnnnnnnnnnnnnnnnnnnnnnnnnnnnnnnnnnnnnnnnnnnnnnnnnnnnnnnnnnnnnnnnnnnnnnnnnnnnnnnnnnnnnnnnnnnnnnnnnnnnnnnnnnnnnnnnnnnnnnnnnnnnnnnnnnnnnnnnnnnnnnnnnnnnnnnnnnnnnnnnnnnnnnnnnnnnnnnnnnnnnnnnnnnnnnnnnnnnnnnnnnnnnnnnnnnnnnnnnnnnnnnnnnnnnnnnnnnnnnnnnnnnnnnnnnnnnnnnnnnnnnnnnnnnnnnnnnnnnnnnnnnnnnnnnnnnnnnnnnnnnnnnnnnnnnnnnnnnnnnnnnnnnnnnnnnnnnnnnnnnnnnnnnnnnnnnnnnnnnnnnnnnnnnnnnnnnnnnnnnnnnnnnnnnnnnnnnnnnnnnnnnnnnnnnnnnnnnnnnnnnnnnnnnnnnnnnnnnnnnnnnnnnnnnnnnnnnnnnnnnnnnnnnnnnnnnnnnnnnnnnnnnnnnnnnnnnnnnnnnnnnnnnnnnnnnnnnnnnnnnnnnnnnnnnnnnnnnnnnnnnnnnnnnnnnnnnnnnnnnnnnnnnnnnnnnnnnnnnnnnnnnnnnnnnnnnnnnnnnnnnnnnnnnnnnnnnnnnnnnnnnnnnnnnnnnnnnnnnnnnnnnnnnnnnnnnnnnnnnnnnnnnnnnnnnnnnnnnnnnnnnnnnnnnnnnnnnnnnnnnnnnnnnnnnnnnnnnnnnnnnnnnnnnnnnnnnnnnnnnnnnnnnnnnnnnnnnnnnnnnnnnnnnnnnnnnnnnnnnnnnnnnnnnnnnnnnnnnnnnnnnnnnnnnnnnnnnnnnnnnnnnnnnnnnnnnnnnnnnnnnnnnnnnnnnnnnnnnnnnnnnnnnnnnnnnnnnnnnnnnnnnnnnnnnnnnnnnnnnnnnnnnnnnnnnnnnnnnnnnnnnnnnnnnnnnnnnnnnnnnnnnnnnnnnnnnnnnnnnnnnnnnnnnnnnnnnnnnnnnnnnnnnnnnnnnnnnnnnnnnnnnnnnnnnnnnnnnnnnnnnnnnnnnnnnnnnnnnnnnnnnnnnnnnnnnnnnnnnnnnnnnnnnnnnnnnnnnnnnnnnnnnnnnnnnnnnnnnnnnnnnnnnnnnnnnnnnnnnnnnnnnnnnnnnnnnnnnnnnnnnnnnnnnnnnnnnnnnnnnnnnnnnnnnnnnnnnnnnnnnnnnnnnnnnnnnnnnnnnnnnnnnnnnnnnnnnnnnnnnnnnnnnnnnnnnnnnnnnnnnnnnnnnnnnnnnnnnnnnnnnnnnnnnnnnnnnnnnnnnnnnnnnnnnnnnnnnnnnnnnnnnnnnnnnnnnnnnnnnnnnnnnnnnnnnnnnnnnnnnnnnnnnnnnnnnnnnnnnnnnnnnnnnnnnnnnnnnnnnnnnnnnnnnnnnnnnnnnnnnnnnnnnnnnnnnnnnnnnnnnnnnnnnnnnnnnnnnnnnnnnnnnnnnnnnnnnnnnnnnnnnnnnnnnnnnnnnnnnnnnnnnnnnnnnnnnnnnnnnnnnnnnnnnnnnnnnnnnnnnnnnnnnnnnnnnnnnnnnnnnnnnnnnnnnnnnnnnnnnnnnnnnnnnnnnnnnnnnnnnnnnnnnnnnnnnnnnnnnnnnnnnnnnnnnnnnnnnnnnnnnnnnnnnnnnnnnnnnnnnnnnnnnnnnnnnnnnnnnnnnnnnnnnnnnnnnnnnnnnnnnnnnnnnnnnnnnnnnnnnnnnnnnnnnnnnnnnnnnnnnnnnnnnnnnnnnnnnnnnnnnnnnnnnnnnnnnnnnnnnnnnnnnnnnnnnnnnnnnnnnnnnnnnnnnnnnnnnnnnnnnnnnnnnnnnnnnnnnnnnnnnnnnnnnnnnnnnnnnnnnnnnnnnnnnnnnnnnnnnnnnnnnnnnnnnnnnnnnnnnnnnnnnnnnnnnnnnnnnnnnnnnnnnnnnnnnnnnnnnnnnnnnnnnnnnnnnnnnnnnnnnnnnnnnnnnnnnnnnnnnnnnnnnnnnnnnnnnnnnnnnnnnnnnnnnnnnnnnnnnnnnnnnnnnnnnnnnnnnnnnnnnnnnnnnnnnnnnnnnnnnnnnnnnnnnnnnnnnnnnnnnnnnnnnnnnnnnnnnnnnnnnnnnnnnnnnnnnnnnnnnnnnnnnnnnnnnnnnnnnnnnnnnnnnnnnnnnnnnnnnnnnnnnnnnnnnnnnnnnnnnnnnnnnnnnnnnnnnnnnnnnnnnnnnnnnnnnnnnnnnnnnnnnnnnnnnnnnnnnnnnnnnnnnnnnnnnnnnnnnnnnnnnnnnnnnnnnnnnnnnnnnnnnnnnnnnnnnnnnnnnnnnnnnnnnnnnnnnnnnnnnnnnnnnnnnnnnnnnnnnnnnnnnnnnnnnnnnnnnnnnnnnnnnnnnnnnnnnnnnnnnnnnnnnnnnnnnnnnnnnnnnnnnnnnnnnnnnnnnnnnnnnnnnnnnnnnnnnnnnnnnnnnnnnnnnnnnnnnnnnnnnnnnnnnnnnnnnnnnnnnnnnnnnnnnnnnnnnnnnnnnnnnnnnnnnnnnnnnnnnnnnnnnnnnnnnnnnnnnnnnnnnnnnnnnnnnnnnnnnnnnnnnnnnnnnnnnnnnnnnnnnnnnnnnnnnnnnnnnnnnnnnnnnnnnnnnnnnnnnnnnnnnnnnnnnnnnnnnnnnnnnnnnnnnnnnnnnnnnnnnnnnnnnnnnnnnnnnnnnnnnnnnnnnnnnnnnnnnnnnnnnnnnnnnnnnnnnnnnnnnnnnnnnnnnnnnnnnnnnnnnnnnnnnnnnnnnnnnnnnnnnnnnnnnnnnnnnnnnnnnnnnnnnnnnnnnnnnnnnnnnnnnnnnnnnnnnnnnnnnnnnnnnnnnnnnnnnnnnnnnnnnnnnnnnnnnnnnnnnnnnnnnnnnnnnnnnnnnnnnnnnnnnnnnnnnnnnnnnnnnnnnnnnnnnnnnnnnnnnnnnnnnnnnnnnnnnnnnnnnnnnnnnnnnnnnnnnnnnnnnnnnnnnnnnnnnnnnnnnnnnnnnnnnnnnnnnnnnnnnnnnnnnnnnnnnnnnnnnnnnnnnnnnnnnnnnnnnnnnnnnnnnnnnnnnnnnnnnnnnnnnnnnnnnnnnnnnnnnnnnnnnnnnnnnnnnnnnnnnnnnnnnnnnnnnnnnnnnnnnnnnnnnnnnnnnnnnnnnnnnnnnnnnnnnnnnnnnnnnnnnnnnnnnnnnnnnnnnnnnnnnnnnnnnnnnnnnnnnnnnnnnnnnnnnnnnnnnnnnnnnnnnnnnnnnnnnnnnnnnnnnnnnnnnnnnnnnnnnnnnnnnnnnnnnnnnnnnnnnnnnnnnnnnnnnnnnnnnnnnnnnnnnnnnnnnnnnnnnnnnnnnnnnnnnnnnnnnnnnnnnnnnnnnnnnnnnnnnnnnnnnnnnnnnnnnnnnnnnnnnnnnnnnnnnnnnnnnnnnnnnnnnnnnnnnnnnnnnnnnnnnnnnnnnnnnnnnnnnnnnnnnnnnnnnnnnnnnnnnnnnnnnnnnnnnnnnnnnnnnnnnnnnnnnnnnnnnnnnnnnnnnnnnnnnnnnnnnnnnnnnnnnnnnnnnnnnnnnnnnnnnnnnnnnnnnnnnnnnnnnnnnnnnnnnnnnnnnnnnnnnnnnnnnnnnnnnnnnnnnnnnnnnnnnnnnnnnnnnnnnnnnnnnnnnnnnnnnnnnnnnnnnnnnnnnnnnnnnnnnnnnnnnnnnnnnnnnnnnnnnnnnnnnnnnnnnnnnnnnnnnnnnnnnnnnnnnnnnnnnnnnnnnnnnnnnnnnnnnnnnnnnnnnnnnnnnnnnnnnnnnnnnnnnnnnnnnnnnnnnnnnnnnnnnnnnnnnnnnnnnnnnnnnnnnnnnnnnnnnnnnnnnnnnnnnnnnnnnnnnnnnnnnnnnnnnnnnnnnnnnnnnnnnnnnnnnnnnnnnnnnnnnnnnnnnnnnnnnnnnnnnnnnnnnnnnnnnnnnnnnnnnnnnnnnnnnnnnnnnnnnnnnnnnnnnnnnnnnnnnnnnnnnnnnnnnnnnnnnnnnnnnnnnnnnnnnnnnnnnnnnnnnnnnnnnnnnnnnnnnnnnnnnnnnnnnnnnnnnnnnnnnnnnnnnnnnnnnnnnnnnnnnnnnnnnnnnnnnnnnnnnnnnnnnnnnnnnnnnnnnnnnnnnnnnnnnnnnnnnnnnnnnnnnnnnnnnnnnnnnnnnnnnnnnnnnnnnnnnnnnnnnnnnnnnnnnnnnnnnnnnnnnnnnnnnnnnnnnnnnnnnnnnnnnnnnnnnnnnnnnnnnnnnnnnnnnnnnnnnnnnnnnnnnnnnnnnnnnnnnnnnnnnnnnnnnnnnnnnnnnnnnnnnnnnnnnnnnnnnnnnnnnnnnnnnnnnnnnnnnnnnnnnnnnnnnnnnnnnnnnnnnnnnnnnnnnnnnnnnnnnnnnnnnnnnnnnnnnnnnnnnnnnnnnnnnnnnnnnnnnnnnnnnnnnnnnnnnnnnnnnnnnnnnnnnnnnnnnnnnnnnnnnnnnnnnnnnnnnnnnnnnnnnnnnnnnnnnnnnnnnnnnnnnnnnnnnnnnnnnnnnnnnnnnnnnnnnnnnnnnnnnnnnnnnnnnnnnnnnnnnnnnnnnnnnnnnnnnnnnnnnnnnnnnnnnnnnnnnnnnnnnnnnnnnnnnnnnnnnnnnnnnnnnnnnnnnnnnnnnnnnnnnnnnnnnnnnnnnnnnnnnnnnnnnnnnnnnnnnnnnnnnnnnnnnnnnnnnnnnnnnnnnnnnnnnnnnnnnnnnnnnnnnnnnnnnnnnnnnnnnnnnnnnnnnnnnnnnnnnnnnnnnnnnnnnnnnnnnnnnnnnnnnnnnnnnnnnnnnnnnnnnnnnnnnnnnnnnnnnnnnnnnnnnnnnnnnnnnnnnnnnnnnnnnnnnnnnnnnnnnnnnnnnnnnnnnnnnnnnnnnnnnnnnnnnnnnnnnnnnnnnnnnnnnnnnnnnnnnnnnnnnnnnnnnnnnnnnnnnnnnnnnnnnnnnnnnnnnnnnnnnnnnnnnnnnnnnnnnnnnnnnnnnnnnnnnnnnnnnnnnnnnnnnnnnnnnnnnnnnnnnnnnnnnnnnnnnnnnnnnnnnnnnnnnnnnnnnnnnnnnnnnnnnnnnnnnnnnnnnnnnnnnnnnnnnnnnnnnnnnnnnnnnnnnnnnnnnnnnnnnnnnnnnnnnnnnnnnnnnnnnnnnnnnnnnnnnnnnnnnnnnnnnnnnnnnnnnnnnnnnnnnnnnnnnnnnnnnnnnnnnnnnnnnnnnnnnnnnnnnnnnnnnnnnnnnnnnnnnnnnnnnnnnnnnnnnnnnnnnnnnnnnnnnnnnnnnnnnnnnnnnnnnnnnnnnnnnnnnnnnnnnnnnnnnnnnnnnnnnnnnnnnnnnnnnnnnnnnnnnnnnnnnnnnnnnnnnnnnnnnnnnnnnnnnnnnnnnnnnnnnnnnnnnnnnnnnnnnnnnnnnnnnnnnnnnnnnnnnnnnnnnnnnnnnnnnnnnnnnnnnnnnnnnnnnnnnnnnnnnnnnnnnnnnnnnnnnnnnnnnnnnnnnnnnnnnnnnnnnnnnnnnnnnnnnnnnnnnnnnnnnnnnnnnnnnnnnnnnnnnnnnnnnnnnnnnnnnnnnnnnnnnnnnnnnnnnnnnnnnnnnnnnnnnnnnnnnnnnnnnnnnnnnnnnnnnnnnnnnnnnnnnnnnnnnnnnnnnnnnnnnnnnnnnnnnnnnnnnnnnnnnnnnnnnnnnnnnnnnnnnnnnnnnnnnnnnnnnnnnnnnnnnnnnnnnnnnnnnnnnnnnnnnnnnnnnnnnnnnnnnnnnnnnnnnnnnnnnnnnnnnnnnnnnnnnnnnnnnnnnnnnnnnnnnnnnnnnnnnnnnnnnnnnnnnnnnnnnnnnnnnnnnnnnnnnnnnnnnnnnnnnnnnnnnnnnnnnnnnnnnnnnnnnnnnnnnnnnnnnnnnnnnnnnnnnnnnnnnnnnnnnnnnnnnnnnnnnnnnnnnnnnnnnnnnnnnnnnnnnnnnnnnnnnnnnnnnnnnnnnnnnnnnnnnnnnnnnnnnnnnnnnnnnnnnnnnnnnnnnnnnnnnnnnnnnnnnnnnnnnnnnnnnnnnnnnnnnnnnnnnnnnnnnnnnnnnnnnnnnnnnnnnnnnnnnnnnnnnnnnnnnnnnnnnnnnnnnnnnnnnnnnnnnnnnnnnnnnnnnnnnnnnnnnnnnnnnnnnnnnnnnnnnnnnnnnnnnnnnnnnnnnnnnnnnnnnnnnnnnnnnnnnnnnnnnnnnnnnnnnnnnnnnnnnnnnnnnnnnnnnnnnnnnnnnnnnnnnnnnnnnnnnnnnnnnnnnnnnnnnnnnnnnnnnnnnnnnnnnnnnnnnnnnnnnnnnnnnnnnnnnnnnnnnnnnnnnnnnnnnnnnnnnnnnnnnnnnnnnnnnnnnnnnnnnnnnnnnnnnnnnnnnnnnnnnnnnnnnnnnnnnnnnnnnnnnnnnnnnnnnnnnnnnnnnnnnnnnnnnnnnnnnnnnnnnnnnnnnnnnnnnnnnnnnnnnnnnnnnnnnnnnnnnnnnnnnnnnnnnnnnnnnnnnnnnnnnnnnnnnnnnnnnnnnnnnnnnnnnnnnnnnnnnnnnnnnnnnnnnnnnnnnnnnnnnnnnnnnnnnnnnnnnnnnnnnnnnnnnnnnnnnnnnnnnnnnnnnnnnnnnnnnnnnnnnnnnnnnnnnnnnnnnnnnnnnnnnnnnnnnnnnnnnnnnnnnnnnnnnnnnnnnnnnnnnnnnnnnnnnnnnnnnnnnnnnnnnnnnnnnnnnnnnnnnnnnnnnnnnnnnnnnnnnnnnnnnnnnnnnnnnnnnnnnnnnnnnnnnnnnnnnnnnnnnnnnnnnnnnnnnnnnnnnnnnnnnnnnnnnnnnnnnnnnnnnnnnnnnnnnnnnnnnnnnnnnnnnnnnnnnnnnnnnnnnnnnnnnnnnnnnnnnnnnnnnnnnnnnnnnnnnnnnnnnnnnnnnnnnnnnnnnnnnnnnnnnnnnnnnnnnnnnnnnnnnnnnnnnnnnnnnnnnnnnnnnnnnnnnnnnnnnnnnnnnnnnnnnnnnnnnnnnnnnnnnnnnnnnnnnnnnnnnnnnnnnnnnnnnnnnnnnnnnnnnnnnnnnnnnnnnnnnnnnnnnnnnnnnnnnnnnnnnnnnnnnnnnnnnnnnnnnnnnnnnnnnnnnnnnnnnnnnnnnnnnnnnnnnnnnnnnnnnnnnnnnnnnnnnnnnnnnnnnnnnnnnnnnnnnnnnnnnnnnnnnnnnnnnnnnnnnnnnnnnnnnnnnnnnnnnnnnnnnnnnnnnnnnnnnnnnnnnnnnnnnnnnnnnnnnnnnnnnnnnnnnnnnnnnnnnnnnnnnnnnnnnnnnnnnnnnnnnnnnnnnnnnnnnnnnnnnnnnnnnnnnnnnnnnnnnnnnnnnnnnnnnnnnnnnnnnnnnnnnnnnnnnnnnnnnnnnnnnnnnnnnnnnnnnnnnnnnnnnnnnnnnnnnnnnnnnnnnnnnnnnnnnnnnnnnnnnnnnnnnnnnnnnnnnnnnnnnnnnnnnnnnnnnnnnnnnnnnnnnnnnnnnnnnnnnnnnnnnnnnnnnnnnnnnnnnnnnnnnnnnnnnnnnnnnnnnnnnnnnnnnnnnnnnnnnnnnnnnnnnnnnnnnnnnnnnnnnnnnnnnnnnnnnnnnnnnnnnnnnnnnnnnnnnnnnnnnnnnnnnnnnnnnnnnnnnnnnnnnnnnnnnnnnnnnnnnnnnnnnnnnnnnnnnnnnnnnnnnnnnnnnnnnnnnnnnnnnnnnnnnnnnnnnnnnnnnnnnnnnnnnnnnnnnnnnnnnnnnnnnnnnnnnnnnnnnnnnnnnnnnnnnnnnnnnnnnnnnnnnnnnnnnnnnnnnnnnnnnnnnnnnnnnnnnnnnnnnnnnnnnnnnnnnnnnnnnnnnnnnnnnnnnnnnnnnnnnnnnnnnnnnnnnnnnnnnnnnnnnnnnnnnnnnnnnnnnnnnnnnnnnnnnnnnnnnnnnnnnnnnnnnnnnnnnnnnnnnnnnnnnnnnnnnnnnnnnnnnnnnnnnnnnnnnnnnnnnnnnnnnnnnnnnnnnnnnnnnnnnnnnnnnnnnnnnnnnnnnnnnnnnnnnnnnnnnnnnnnnnnnnnnnnnnnnnnnnnnnnnnnnnnnnnnnnnnnnnnnnnnnnnnnnnnnnnnnnnnnnnnnnnnnnnnnnnnnnnnnnnnnnnnnnnnnnnnnnnnnnnnnnnnnnnnnnnnnnnnnnnnnnnnnnnnnnnnnnnnnnnnnnnnnnnnnnnnnnnnnnnnnnnnnnnnnnnnnnnnnnnnnnnnnnnnnnnnnnnnnnnnnnnnnnnnnnnnnnnnnnnnnnnnnnnnnnnnnnnnnnnnnnnnnnnnnnnnnnnnnnnnnnnnnnnnnnnnnnnnnnnnnnnnnnnnnnnnnnnnnnnnnnnnnnnnnnnnnnnnnnnnnnnnnnnnnnnnnnnnnnnnnnnnnnnnnnnnnnnnnnnnnnnnnnnnnnnnnnnnnnnnnnnnnnnnnnnnnnnnnnnnnnnnnnnnnnnnnnnnnnnnnnnnnnnnnnnnnnnnnnnnnnnnnnnnnnnnnnnnnnnnnnnnnnnnnnnnnnnnnnnnnnnnnnnnnnnnnnnnnnnnnnnnnnnnnnnnnnnnnnnnnnnnnnnnnnnnnnnnnnnnnnnnnnnnnnnnnnnnnnnnnnnnnnnnnnnnnnnnnnnnnnnnnnnnnnnnnnnnnnnnnnnnnnnnnnnnnnnnnnnnnnnnnnnnnnnnnnnnnnnnnnnnnnnnnnnnnnnnnnnnnnnnnnnnnnnnnnnnnnnnnnnnnnnnnnnnnnnnnnnnnnnnnnnnnnnnnnnnnnnnnnnnnnnnnnnnnnnnnnnnnnnnnnnnnnnnnnnnnnnnnnnnnnnnnnnnnnnnnnnnnnnnnnnnnnnnnnnnnnnnnnnnnnnnnnnnnnnnnnnnnnnnnnnnnnnnnnnnnnnnnnnnnnnnnnnnnnnnnnnnnnnnnnnnnnnnnnnnnnnnnnnnnnnnnnnnnnnnnnnnnnnnnnnnnnnnnnnnnnnnnnnnnnnnnnnnnnnnnnnnnnnnnnnnnnnnnnnnnnnnnnnnnnnnnnnnnnnnnnnnnnnnnnnnnnnnnnnnnnnnnnnnnnnnnnnnnnnnnnnnnnnnnnnnnnnnnnnnnnnnnnnnnnnnnnnnnnnnnnnnnnnnnnnnnnnnnnnnnnnnnnnnnnnnnnnnnnnnnnnnnnnnnnnnnnnnnnnnnnnnnnnnnnnnnnnnnnnnnnnnnnnnnnnnnnnnnnnnnnnnnnnnnnnnnnnnnnnnnnnnnnnnnnnnnnnnnnnnnnnnnnnnnnnnnnnnnnnnnnnnnnnnnnnnnnnnnnnnnnnnnnnnnnnnnnnnnnnnnnnnnnnnnnnnnnnnnnnnnnnnnnnnnnnnnnnnnnnnnnnnnnnnnnnnnnnnnnnnnnnnnnnnnnnnnnnnnnnnnnnnnnnnnnnnnnnnnnnnnnnnnnnnnnnnnnnnnnnnnnnnnnnnnnnnnnnnnnnnnnnnnnnnnnnnnnnnnnnnnnnnnnnnnnnnnnnnnnnnnnnnnnnnnnnnnnnnnnnnnnnnnnnnnnnnnnnnnnnnnnnnnnnnnnnnnnnnnnnnnnnnnnnnnnnnnnnnnnnnnnnnnnnnnnnnnnnnnnnnnnnnnnnnnnnnnnnnnnnnnnnnnnnnnnnnnnnnnnnnnnnnnnnnnnnnnnnnnnnnnnnnnnnnnnnnnnnnnnnnnnnnnnnnnnnnnnnnnnnnnnnnnnnnnnnnnnnnnnnnnnnnnnnnnnnnnnnnnnnnnnnnnnnnnnnnnnnnnnnnnnnnnnnnnnnnnnnnnnnnnnnnnnnnnnnnnnnnnnnnnnnnnnnnnnnnnnnnnnnnnnnnnnnnnnnnnnnnnnnnnnnnnnnnnnnnnnnnnnnnnnnnnnnnnnnnnnnnnnnnnnnnnnnnnnnnnnnnnnnnnnnnnnnnnnnnnnnnnnnnnnnnnnnnnnnnnnnnnnnnnnnnnnnnnnnnnnnnnnnnnnnnnnnnnnnnnnnnnnnnnnnnnnnnnnnnnnnnnnnnnnnnnnnnnnnnnnnnnnnnnnnnnnnnnnnnnnnnnnnnnnnnnnnnnnnnnnnnnnnnnnnnnnnnnnnnnnnnnnnnnnnnnnnnnnnnnnnnnnnnnnnnnnnnnnnnnnnnnnnnnnnnnnnnnnnnnnnnnnnnnnnnnnnnnnnnnnnnnnnnnnnnnnnnnnnnnnnnnnnnnnnnnnnnnnnnnnnnnnnnnnnnnnnnnnnnnnnnnnnnnnnnnnnnnnnnnnnnnnnnnnnnnnnnnnnnnnnnnnnnnnnnnnnnnnnnnnnnnnnnnnnnnnnnnnnnnnnnnnnnnnnnnnnnnnnnnnnnnnnnnnnnnnnnnnnnnnnnnnnnnnnnnnnnnnnnnnnnnnnnnnnnnnnnnnnnnnnnnnnnnnnnnnnnnnnnnnnnnnnnnnnnnnnnnnnnnnnnnnnnnnnnnnnnnnnnnnnnnnnnnnnnnnnnnnnnnnnnnnnnnnnnnnnnnnnnnnnnnnnnnnnnnnnnnnnnnnnnnnnnnnnnnnnnnnnnnnnnnnnnnnnnnnnnnnnnnnnnnnnnnnnnnnnnnnnnnnnnnnnnnnnnnnnnnnnnnnnnnnnnnnnnnnnnnnnnnnnnnnnnnnnnnnnnnnnnnnnnnnnnnnnnnnnnnnnnnnnnnnnnnnnnnnnnnnnnnnnnnnnnnnnnnnnnnnnnnnnnnnnnnnnnnnnnnnnnnnnnnnnnnnnnnnnnnnnnnnnnnnnnnnnnnnnnnnnnnnnnnnnnnnnnnnnnnnnnnnnnnnnnnnnnnnnnnnnnnnnnnnnnnnnnnnnnnnnnnnnnnnnnnnnnnnnnnnnnnnnnnnnnnnnnnnnnnnnnnnnnnnnnnnnnnnnnnnnnnnnnnnnnnnnnnnnnnnnnnnnnnnnnnnnnnnnnnnnnnnnnnnnnnnnnnnnnnnnnnnnnnnnnnnnnnnnnnnnnnnnnnnnnnnnnnnnnnnnnnnnnnnnnnnnnnnnnnnnnnnnnnnnnnnnnnnnnnnnnnnnnnnnnnnnnnnnnnnnnnnnnnnnnnnnnnnnnnnnnnnnnnnnnnnnnnnnnnnnnnnnnnnnnnnnnnnnnnnnnnnnnnnnnnnnnnnnnnnnnnnnnnnnnnnnnnnnnnnnnnnnnnnnnnnnnnnnnnnnnnnnnnnnnnnnnnnnnnnnnnnnnnnnnnnnnnnnnnnnnnnnnnnnnnnnnnnnnnnnnnnnnnnnnnnnnnnnnnnnnnnnnnnnnnnnnnnnnnnnnnnnnnnnnnnnnnnnnnnnnnnnnnnnnnnnnnnnnnnnnnnnnnnnnnnnnnnnnnnnnnnnnnnnnnnnnnnnnnnnnnnnnnnnnnnnnnnnnnnnnnnnnnnnnnnnnnnnnnnnnnnnnnnnnnnnnnnnnnnnnnnnnnnnnnnnnnnnnnnnnnnnnnnnnnnnnnnnnnnnnnnnnnnnnnnnnnnnnnnnnnnnnnnnnnnnnnnnnnnnnnnnnnnnnnnnnnnnnnnnnnnnnnnnnnnnnnnnnnnnnnnnnnnnnnnnnnnnnnnnnnnnnnnnnnnnnnnnnnnnnnnnnnnnnnnnnnnnnnnnnnnnnnnnnnnnnnnnnnnnnnnnnnnnnnnnnnnnnnnnnnnnnnnnnnnnnnnnnnnnnnnnnnnnnnnnnnnnnnnnnnnnnnnnnnnnnnnnnnnnnnnnnnnnnnnnnnnnnnnnnnnnnnnnnnnnnnnnnnnnnnnnnnnnnnnnnnnnnnnnnnnnnnnnnnnnnnnnnnnnnnnnnnnnnnnnnnnnnnnnnnnnnnnnnnnnnnnnnnnnnnnnnnnnnnnnnnnnnnnnnnnnnnnnnnnnnnnnnnnnnnnnnnnnnnnnnnnnnnnnnnnnnnnnnnnnnnnnnnnnnnnnnnnnnnnnnnnnnnnnnnnnnnnnnnnnnnnnnnnnnnnnnnnnnnnnnnnnnnnnnnnnnnnnnnnnnnnnnnnnnnnnnnnnnnnnnnnnnnnnnnnnnnnnnnnnnnnnnnnnnnnnnnnnnnnnnnnnnnnnnnnnnnnnnnnnnnnnnnnnnnnnnnnnnnnnnnnnnnnnnnnnnnnnnnnnnnnnnnnnnnnnnnnnnnnnnnnnnnnnnnnnnnnnnnnnnnnnnnnnnnnnnnnnnnnnnnnnnnnnnnnnnnnnnnnnnnnnnnnnnnnnnnnnnnnnnnnnnnnnnnnnnnnnnnnnnnnnnnnnnnnnnnnnnnnnnnnnnnnnnnnnnnnnnnnnnnnnnnnnnnnnnnnnnnnnnnnnnnnnnnnnnnnnnnnnnnnnnnnnnnnnnnnnnnnnnnnnnnnnnnnnnnnnnnnnnnnnnnnnnnnnnnnnnnnnnnnnnnnnnnnnnnnnnnnnnnnnnnnnnnnnnnnnnnnnnnnnnnnnnnnnnnnnnnnnnnnnnnnnnnnnnnnnnnnnnnnnnnnnnnnnnnnnnnnnnnnnnnnnnnnnnnnnnnnnnnnnnnnnnnnnnnnnnnnnnnnnnnnnnnnnnnnnnnnnnnnnnnnnnnnnnnnnnnnnnnnnnnnnnnnnnnnnnnnnnnnnnnnnnnnnnnnnnnnnnnnnnnnnnnnnnnnnnnnnnnnnnnnnnnnnnnnnnnnnnnnnnnnnnnnnnnnnnnnnnnnnnnnnnnnnnnnnnnnnnnnnnnnnnnnnnnnnnnnnnnnnnnnnnnnnnnnnnnnnnnnnnnnnnnnnnnnnnnnnnnnnnnnnnnnnnnnnnnnnnnnnnnnnnnnnnnnnnnnnnnnnnnnnnnnnnnnnnnnnnnnnnnnnnnnnnnnnnnnnnnnnnnnnnnnnnnnnnnnnnnnnnnnnnnnnnnnnnnnnnnnnnnnnnnnnnnnnnnnnnnnnnnnnnnnnnnnnnnnnnnnnnnnnnnnnnnnnnnnnnnnnnnnnnnnnnnnnnnnnnnnnnnnnnnnnnnnnnnnnnnnnnnnnnnnnnnnnnnnnnnnnnnnnnnnnnnnnnnnnnnnnnnnnnnnnnnnnnnnnnnnnnnnnnnnnnnnnnnnnnnnnnnnnnnnnnnnnnnnnnnnnnnnnnnnnnnnnnnnnnnnnnnnnnnnnnnnnnnnnnnnnnnnnnnnnnnnnnnnnnnnnnnnnnnnnnnnnnnnnnnnnnnnnnnnnnnnnnnnnnnnnnnnnnnnnnnnnnnnnnnnnnnnnnnnnnnnnnnnnnnnnnnnnnnnnnnnnnnnnnnnnnnnnnnnnnnnnnnnnnnnnnnnnnnnnnnnnnnnnnnnnnnnnnnnnnnnnnnnnnnnnnnnnnnnnnnnnnnnnnnnnnnnnnnnnnnnnnnnnnnnnnnnnnnnnnnnnnnnnnnnnnnnnnnnnnnnnnnnnnnnnnnnnnnnnnnnnnnnnnnnnnnnnnnnnnnnnnnnnnnnnnnnnnnnnnnnnnnnnnnnnnnnnnnnnnnnnnnnnnnnnnnnnnnnnnnnnnnnnnnnnnnnnnnnnnnnnnnnnnnnnnnnnnnnnnnnnnnnnnnnnnnnnnnnnnnnnnnnnnnnnnnnnnnnnnnnnnnnnnnnnnnnnnnnnnnnnnnnnnnnnnnnnnnnnnnnnnnnnnnnnnnnnnnnnnnnnnnnnnnnnnnnnnnnnnnnnnnnnnnnnnnnnnnnnnnnnnnnnnnnnnnnnnnnnnnnnnnnnnnnnnnnnnnnnnnnnnnnnnnnnnnnnnnnnnnnnnnnnnnnnnnnnnnnnnnnnnnnnnnnnnnnnnnnnnnnnnnnnnnnnnnnnnnnnnnnnnnnnnnnnnnnnnnnnnnnnnnnnnnnnnnnnnnnnnnnnnnnnnnnnnnnnnnnnnnnnnnnnnnnnnnnnnnnnnnnnnnnnnnnnnnnnnnnnnnnnnnnnnnnnnnnnnnnnnnnnnnnnnnnnnnnnnnnnnnnnnnnnnnnnnnnnnnnnnnnnnnnnnnnnnnnnnnnnnnnnnnnnnnnnnnnnnnnnnnnnnnnnnnnnnnnnnnnnnnnnnnnnnnnnnnnnnnnnnnnnnnnnnnnnnnnnnnnnnnnnnnnnnnnnnnnnnnnnnnnnnnnnnnnnnnnnnnnnnnnnnnnnnnnnnnnnnnnnnnnnnnnnnnnnnnnnnnnnnnnnnnnnnnnnnnnnnnnnnnnnnnnnnnnnnnnnnnnnnnnnnnnnnnnnnnnnnnnnnnnnnnnnnnnnnnnnnnnnnnnnnnnnnnnnnnnnnnnnnnnnnnnnnnnnnnnnnnnnnnnnnnnnnnnnnnnnnnnnnnnnnnnnnnnnnnnnnnnnnnnnnnnnnnnnnnnnnnnnnnnnnnnnnnnnnnnnnnnnnnnnnnnnnnnnnnnnnnnnnnnnnnnnnnnnnnnnnnnnnnnnnnnnnnnnnnnnnnnnnnnnnnnnnnnnnnnnnnnnnnnnnnnnnnnnnnnnnnnnnnnnnnnnnnnnnnnnnnnnnnnnnnnnnnnnnnnnnnnnnnnnnnnnnnnnnnnnnnnnnnnnnnnnnnnnnnnnnnnnnnnnnnnnnnnnnnnnnnnnnnnnnnnnnnnnnnnnnnnnnnnnnnnnnnnnnnnnnnnnnnnnnnnnnnnnnnnnnnnnnnnnnnnnnnnnnnnnnnnnnnnnnnnnnnnnnnnnnnnnnnnnnnnnnnnnnnnnnnnnnnnnnnnnnnnnnnnnnnnnnnnnnnnnnnnnnnnnnnnnnnnnnnnnnnnnnnnnnnnnnnnnnnnnnnnnnnnnnnnnnnnnnnnnnnnnnnnnnnnnnnnnnnnnnnnnnnnnnnnnnnnnnnnnnnnnnnnnnnnnnnnnnnnnnnnnnnnnnnnnnnnnnnnnnnnnnnnnnnnnnnnnnnnnnnnnnnnnnnnnnnnnnnnnnnnnnnnnnnnnnnnnnnnnnnnnnnnnnnnnnnnnnnnnnnnnnnnnnnnnnnnnnnnnnnnnnnnnnnnnnnnnnnnnnnnnnnnnnnnnnnnnnnnnnnnnnnnnnnnnnnnnnnnnnnnnnnnnnnnnnnnnnnnnnnnnnnnnnnnnnnnnnnnnnnnnnnnnnnnnnnnnnnnnnnnnnnnnnnnnnnnnnnnnnnnnnnnnnnnnnnnnnnnnnnnnnnnnnnnnnnnnnnnnnnnnnnnnnnnnnnnnnnnnnnnnnnnnnnnnnnnnnnnnnnnnnnnnnnnnnnnnnnnnnnnnnnnnnnnnnnnnnnnnnnnnnnnnnnnnnnnnnnnnnnnnnnnnnnnnnnnnnnnnnnnnnnnnnnnnnnnnnnnnnnnnnnnnnnnnnnnnnnnnnnnnnnnnnnnnnnnnnnnnnnnnnnnnnnnnnnnnnnnnnnnnnnnnnnnnnnnnnnnnnnnnnnnnnnnnnnnnnnnnnnnnnnnnnnnnnnnnnnnnnnnnnnnnnnnnnnnnnnnnnnnnnnnnnnnnnnnnnnnnnnnnnnnnnnnnnnnnnnnnnnnnnnnnnnnnnnnnnnnnnnnnnnnnnnnnnnnnnnnnnnnnnnnnnnnnnnnnnnnnnnnnnnnnnnnnnnnnnnnnnnnnnnnnnnnnnnnnnnnnnnnnnnnnnnnnnnnnnnnnnnnnnnnnnnnnnnnnnnnnnnnnnnnnnnnnnnnnnnnnnnnnnnnnnnnnnnnnnnnnnnnnnnnnnnnnnnnnnnnnnnnnnnnnnnnnnnnnnnnnnnnnnnnnnnnnnnnnnnnnnnnnnnnnnnnnnnnnnnnnnnnnnnnnnnnnnnnnnnnnnnnnnnnnnnnnnnnnnnnnnnnnnnnnnnnnnnnnnnnnnnnnnnnnnnnnnnnnnnnnnnnnnnnnnnnnnnnnnnnnnnnnnnnnnnnnnnnnnnnnnnnnnnnnnnnnnnnnnnnnnnnnnnnnnnnnnnnnnnnnnnnnnnnnnnnnnnnnnnnnnnnnnnnnnnnnnnnnnnnnnnnnnnnnnnnnnnnnnnnnnnnnnnnnnnnnnnnnnnnnnnnnnnnnnnnnnnnnnnnnnnnnnnnnnnnnnnnnnnnnnnnnnnnnnnnnnnnnnnnnnnnnnnnnnnnnnnnnnnnnnnnnnnnnnnnnnnnnnnnnnnnnnnnnnnnnnnnnnnnnnnnnnnnnnnnnnnnnnnnnnnnnnnnnnnnnnnnnnnnnnnnnnnnnnnnnnnnnnnnnnnnnnnnnnnnnnnnnnnnnnnnnnnnnnnnnnnnnnnnnnnnnnnnnnnnnnnnnnnnnnnnnnnnnnnnnnnnnnnnnnnnnnnnnnnnnnnnnnnnnnnnnnnnnnnnnnnnnnnnnnnnnnnnnnnnnnnnnnnnnnnnnnnnnnnnnnnnnnnnnnnnnnnnnnnnnnnnnnnnnnnnnnnnnnnnnnnnnnnnnnnnnnnnnnnnnnnnnnnnnnnnnnnnnnnnnnnnnnnnnnnnnnnnnnnnnnnnnnnnnnnnnnnnnnnnnnnnnnnnnnnnnnnnnnnnnnnnnnnnnnnnnnnnnnnnnnnnnnnnnnnnnnnnnnnnnnnnnnnnnnnnnnnnnnnnnnnnnnnnnnnnnnnnnnnnnnnnnnnnnnnnnnnnnnnnnnnnnnnnnnnnnnnnnnnnnnnnnnnnnnnnnnnnnnnnnnnnnnnnnnnnnnnnnnnnnnnnnnnnnnnnnnnnnnnnnnnnnnnnnnnnnnnnnnnnnnnnnnnnnnnnnnnnnnnnnnnnnnnnnnnnnnnnnnnnnnnnnnnnnnnnnnnnnnnnnnnnnnnnnnnnnnnnnnnnnnnnnnnnnnnnnnnnnnnnnnnnnnnnnnnnnnnnnnnnnnnnnnnnnnnnnnnnnnnnnnnnnnnnnnnnnnnnnnnnnnnnnnnnnnnnnnnnnnnnnnnnnnnnnnnnnnnnnnnnnnnnnnnnnnnnnnnnnnnnnnnnnnnnnnnnnnnnnnnnnnnnnnnnnnnnnnnnnnnnnnnnnnnnnnnnnnnnnnnnnnnnnnnnnnnnnnnnnnnnnnnnnnnnnnnnnnnnnnnnnnnnnnnnnnnnnnnnnnnnnnnnnnnnnnnnnnnnnnnnnnnnnnnnnnnnnnnnnnnnnnnnnnnnnnnnnnnnnnnnnnnnnnnnnnnnnnnnnnnnnnnnnnnnnnnnnnnnnnnnnnnnnnnnnnnnnnnnnnnnnnnnnnnnnnnnnnnnnnnnnnnnnnnnnnnnnnnnnnnnnnnnnnnnnnnnnnnnnnnnnnnnnnnnnnnnnnnnnnnnnnnnnnnnnnnnnnnnnnnnnnnnnnnnnnnnnnnnnnnnnnnnnnnnnnnnnnnnnnnnnnnnnnnnnnnnnnnnnnnnnnnnnnnnnnnnnnnnnnnnnnnnnnnnnnnnnnnnnnnnnnnnnnnnnnnnnnnnnnnnnnnnnnnnnnnnnnnnnnnnnnnnnnnnnnnnnnnnnnnnnnnnnnnnnnnnnnnnnnnnnnnnnnnnnnnnnnnnnnnnnnnnnnnnnnnnnnnnnnnnnnnnnnnnnnnnnnnnnnnnnnnnnnnnnnnnnnnnnnnnnnnnnnnnnnnnnnnnnnnnnnnnnnnnnnnnnnnnnnnnnnnnnnnnnnnnnnnnnnnnnnnnnnnnnnnnnnnnnnnnnnnnnnnnnnnnnnnnnnnnnnnnnnnnnnnnnnnnnnnnnnnnnnnnnnnnnnnnnnnnnnnnnnnnnnnnnnnnnnnnnnnnnnnnnnnnnnnnnnnnnnnnnnnnnnnnnnnnnnnnnnnnnnnnnnnnnnnnnnnnnnnnnnnnnnnnnnnnnnnnnnnnnnnnnnnnnnnnnnnnnnnnnnnnnnnnnnnnnnnnnnnnnnnnnnnnnnnnnnnnnnnnnnnnnnnnnnnnnnnnnnnnnnnnnnnnnnnnnnnnnnnnnnnnnnnnnnnnnnnnnnnnnnnnnnnnnnnnnnnnnnnnnnnnnnnnnnnnnnnnnnnnnnnnnnnnnnnnnnnnnnnnnnnnnnnnnnnnnnnnnnnnnnnnnnnnnnnnnnnnnnnnnnnnnnnnnnnnnnnnnnnnnnnnnnnnnnnnnnnnnnnnnnnnnnnnnnnnnnnnnnnnnnnnnnnnnnnnnnnnnnnnnnnnnnnnnnnnnnnnnnnnnnnnnnnnnnnnnnnnnnnnnnnnnnnnnnnnnnnnnnnnnnnnnnnnnnnnnnnnnnnnnnnnnnnnnnnnnnnnnnnnnnnnnnnnnnnnnnnnnnnnnnnnnnnnnnnnnnnnnnnnnnnnnnnnnnnnnnnnnnnnnnnnnnnnnnnnnnnnnnnnnnnnnnnnnnnnnnnnnnnnnnnnnnnnnnnnnnnnnnnnnnnnnnnnnnnnnnnnnnnnnnnnnnnnnnnnnnnnnnnnnnnnnnnnnnnnnnnnnnnnnnnnnnnnnnnnnnnnnnnnnnnnnnnnnnnnnnnnnnnnnnnnnnnnnnnnnnnnnnnnnnnnnnnnnnnnnnnnnnnnnnnnnnnnnnnnnnnnnnnnnnnnnnnnnnnnnnnnnnnnnnnnnnnnnnnnnnnnnnnnnnnnnnnnnnnnnnnnnnnnnnnnnnnnnnnnnnnnnnnnnnnnnnnnnnnnnnnnnnnnnnnnnnnnnnnnnnnnnnnnnnnnnnnnnnnnnnnnnnnnnnnnnnnnnnnnnnnnnnnnnnnnnnnnnnnnnnnnnnnnnnnnnnnnnnnnnnnnnnnnnnnnnnnnnnnnnnnnnnnnnnnnnnnnnnnnnnnnnnnnnnnnnnnnnnnnnnnnnnnnnnnnnnnnnnnnnnnnnnnnnnnnnnnnnnnnnnnnnnnnnnnnnnnnnnnnnnnnnnnnnnnnnnnnnnnnnnnnnnnnnnnnnnnnnnnnnnnnnnnnnnnnnnnnnnnnnnnnnnnnnnnnnnnnnnnnnnnnnnnnnnnnnnnnnnnnnnnnnnnnnnnnnnnnnnnnnnnnnnnnnnnnnnnnnnnnnnnnnnnnnnnnnnnnnnnnnnnnnnnnnnnnnnnnnnnnnnnnnnnnnnnnnnnnnnnnnnnnnnnnnnnnnnnnnnnnnnnnnnnnnnnnnnnnnnnnnnnnnnnnnnnnnnnnnnnnnnnnnnnnnnnnnnnnnnnnnnnnnnnnnnnnnnnnnnnnnnnnnnnnnnnnnnnnnnnnnnnnnnnnnnnnnnnnnnnnnnnnnnnnnnnnnnnnnnnnnnnnnnnnnnnnnnnnnnnnnnnnnnnnnnnnnnnnnnnnnnnnnnnnnnnnnnnnnnnnnnnnnnnnnnnnnnnnnnnnnnnnnnnnnnnnnnnnnnnnnnnnnnnnnnnnnnnnnnnnnnnnnnnnnnnnnnnnnnnnnnnnnnnnnnnnnnnnnnnnnnnnnnnnnnnnnnnnnnnnnnnnnnnnnnnnnnnnnnnnnnnnnnnnnnnnnnnnnnnnnnnnnnnnnnnnnnnnnnnnnnnnnnnnnnnnnnnnnnnnnnnnnnnnnnnnnnnnnnnnnnnnnnnnnnnnnnnnnnnnnnnnnnnnnnnnnnnnnnnnnnnnnnnnnnnnnnnnnnnnnnnnnnnnnnnnnnnnnnnnnnnnnnnnnnnnnnnnnnnnnnnnnnnnnnnnnnnnnnnnnnnnnnnnnnnnnnnnnnnnnnnnnnnnnnnnnnnnnnnnnnnnnnnnnnnnnnnnnnnnnnnnnnnnnnnnnnnnnnnnnnnnnnnnnnnnnnnnnnnnnnnnnnnnnnnnnnnnnnnnnnnnnnnnnnnnnnnnnnnnnnnnnnnnnnnnnnnnnnnnnnnnnnnnnnnnnnnnnnnnnnnnnnnnnnnnnnnnnnnnnnnnnnnnnnnnnnnnnnnnnnnnnnnnnnnnnnnnnnnnnnnnnnnnnnnnnnnnnnnnnnnnnnnnnnnnnnnnnnnnnnnnnnnnnnnnnnnnnnnnnnnnnnnnnnnnnnnnnnnnnnnnnnnnnnnnnnnnnnnnnnnnnnnnnnnnnnnnnnnnnnnnnnnnnnnnnnnnnnnnnnnnnnnnnnnnnnnnnnnnnnnnnnnnnnnnnnnnnnnnnnnnnnnnnnnnnnnnnnnnnnnnnnnnnnnnnnnnnnnnnnnnnnnnnnnnnnnnnnnnnnnnnnnnnnnnnnnnnnnnnnnnnnnnnnnnnnnnnnnnnnnnnnnnnnnnnnnnnnnnnnnnnnnnnnnnnnnnnnnnnnnnnnnnnnnnnnnnnnnnnnnnnnnnnnnnnnnnnnnnnnnnnnnnnnnnnnnnnnnnnnnnnnnnnnnnnnnnnnnnnnnnnnnnnnnnnnnnnnnnnnnnnnnnnnnnnnnnnnnnnnnnnnnnnnnnnnnnnnnnnnnnnnnnnnnnnnnnnnnnnnnnnnnnnnnnnnnnnnnnnnnnnnnnnnnnnnnnnnnnnnnnnnnnnnnnnnnnnnnnnnnnnnnnnnnnnnnnnnnnnnnnnnnnnnnnnnnnnnnnnnnnnnnnnnnnnnnnnnnnnnnnnnnnnnnnnnnnnnnnnnnnnnnnnnnnnnnnnnnnnnnnnnnnnnnnnnnnnnnnnnnnnnnnnnnnnnnnnnnnnnnnnnnnnnnnnnnnnnnnnnnnnnnnnnnnnnnnnnnnnnnnnnnnnnnnnnnnnnnnnnnnnnnnnnnnnnnnnnnnnnnnnnnnnnnnnnnnnnnnnnnnnnnnnnnnnnnnnnnnnnnnnnnnnnnnnnnnnnnnnnnnnnnnnnnnnnnnnnnnnnnnnnnnnnnnnnnnnnnnnnnnnnnnnnnnnnnnnnnnnnnnnnnnnnnnnnnnnnnnnnnnnnnnnnnnnnnnnnnnnnnnnnnnnnnnnnnnnnnnnnnnnnnnnnnnnnnnnnnnnnnnnnnnnnnnnnnnnnnnnnnnnnnnnnnnnnnnnnnnnnnnnnnnnnnnnnnnnnnnnnnnnnnnnnnnnnnnnnnnnnnnnnnnnnnnnnnnnnnnnnnnnnnnnnnnnnnnnnnnnnnnnnnnnnnnnnnnnnnnnnnnnnnnnnnnnnnnnnnnnnnnnnnnnnnnnnnnnnnnnnnnnnnnnnnnnnnnnnnnnnnnnnnnnnnnnnnnnnnnnnnnnnnnnnnnnnnnnnnnnnnnnnnnnnnnnnnnnnnnnnnnnnnnnnnnnnnnnnnnnnnnnnnnnnnnnnnnnnnnnnnnnnnnnnnnnnnnnnnnnnnnnnnnnnnnnnnnnnnnnnnnnnnnnnnnnnnnnnnnnnnnnnnnnnnnnnnnnnnnnnnnnnnnnnnnnnnnnnnnnnnnnnnnnnnnnnnnnnnnnnnnnnnnnnnnnnnnnnnnnnnnnnnnnnnnnnnnnnnnnnnnnnnnnnnnnnnnnnnnnnnnnnnnnnnnnnnnnnnnnnnnnnnnnnnnnnnnnnnnnnnnnnnnnnnnnnnnnnnnnnnnnnnnnnnnnnnnnnnnnnnnnnnnnnnnnnnnnnnnnnnnnnnnnnnnnnnnnnnnnnnnnnnnnnnnnnnnnnnnnnnnnnnnnnnnnnnnnnnnnnnnnnnnnnnnnnnnnnnnnnnnnnnnnnnnnnnnnnnnnnnnnnnnnnnnnnnnnnnnnnnnnnnnnnnnnnnnnnnnnnnnnnnnnnnnnnnnnnnnnnnnnnnnnnnnnnnnnnnnnnnnnnnnnnnnnnnnnnnnnnnnnnnnnnnnnnnnnnnnnnnnnnnnnnnnnnnnnnnnnnnnnnnnnnnnnnnnnnnnnnnnnnnnnnnnnnnnnnnnnnnnnnnnnnnnnnnnnnnnnnnnnnnnnnnnnnnnnnnnnnnnnnnnnnnnnnnnnnnnnnnnnnnnnnnnnnnnnnnnnnnnnnnnnnnnnnnnnnnnnnnnnnnnnnnnnnnnnnnnnnnnnnnnnnnnnnnnnnnnnnnnnnnnnnnnnnnnnnnnnnnnnnnnnnnnnnnnnnnnnnnnnnnnnnnnnnnnnnnnnnnnnnnnnnnnnnnnnnnnnnnnnnnnnnnnnnnnnnnnnnnnnnnnnnnnnnnnnnnnnnnnnnnnnnnnnnnnnnnnnnnnnnnnnnnnnnnnnnnnnnnnnnnnnnnnnnnnnnnnnnnnnnnnnnnnnnnnnnnnnnnnnnnnnnnnnnnnnnnnnnnnnnnnnnnnnnnnnnnnnnnnnnnnnnnnnnnnnnnnnnnnnnnnnnnnnnnnnnnnnnnnnnnnnnnnnnnnnnnnnnnnnnnnnnnnnnnnnnnnnnnnnnnnnnnnnnnnnnnnnnnnnnnnnnnnnnnnnnnnnnnnnnnnnnnnnnnnnnnnnnnnnnnnnnnnnnnnnnnnnnnnnnnnnnnnnnnnnnnnnnnnnnnnnnnnnnnnnnnnnnnnnnnnnnnnnnnnnnnnnnnnnnnnnnnnnnnnnnnnnnnnnnnnnnnnnnnnnnnnnnnnnnnnnnnnnnnnnnnnnnnnnnnnnnnnnnnnnnnnnnnnnnnnnnnnnnnnnnnnnnnnnnnnnnnnnnnnnnnnnnnnnnnnnnnnnnnnnnnnnnnnnnnnnnnnnnnnnnnnnnnnnnnnnnnnnnnnnnnnnnnnnnnnnnnnnnnnnnnnnnnnnnnnnnnnnnnnnnnnnnnnnnnnnnnnnnnnnnnnnnnnnnnnnnnnnnnnnnnnnnnnnnnnnnnnnnnnnnnnnnnnnnnnnnnnnnnnnnnnnnnnnnnnnnnnnnnnnnnnnnnnnnnnnnnnnnnnnnnnnnnnnnnnnnnnnnnnnnnnnnnnnnnnnnnnnnnnnnnnnnnnnnnnnnnnnnnnnnnnnnnnnnnnnnnnnnnnnnnnnnnnnnnnnnnnnnnnnnnnnnnnnnnnnnnnnnnnnnnnnnnnnnnnnnnnnnnnnnnnnnnnnnnnnnnnnnnnnnnnnnnnnnnnnnnnnnnnnnnnnnnnnnnnnnnnnnnnnnnnnnnnnnnnnnnnnnnnnnnnnnnnnnnnnnnnnnnnnnnnnnnnnnnnnnnnnnnnnnnnnnnnnnnnnnnnnnnnnnnnnnnnnnnnnnnnnnnnnnnnnnnnnnnnnnnnnnnnnnnnnnnnnnnnnnnnnnnnnnnnnnnnnnnnnnnnnnnnnnnnnnnnnnnnnnnnnnnnnnnnnnnnnnnnnnnnnnnnnnnnnnnnnnnnnnnnnnnnnnnnnnnnnnnnnnnnnnnnnnnnnnnnnnnnnnnnnnnnnnnnnnnnnnnnnnnnnnnnnnnnnnnnnnnnnnnnnnnnnnnnnnnnnnnnnnnnnnnnnnnnnnnnnnnnnnnnnnnnnnnnnnnnnnnnnnnnnnnnnnnnnnnnnnnnnnnnnnnnnnnnnnnnnnnnnnnnnnnnnnnnnnnnnnnnnnnnnnnnnnnnnnnnnnnnnnnnnnnnnnnnnnnnnnnnnnnnnnnnnnnnnnnnnnnnnnnnnnnnnnnnnnnnnnnnnnnnnnnnnnnnnnnnnnnnnnnnnnnnnnnnnnnnnnnnnnnnnnnnnnnnnnnnnnnnnnnnnnnnnnnnnnnnnnnnnnnnnnnnnnnnnnnnnnnnnnnnnnnnnnnnnnnnnnnnnnnnnnnnnnnnnnnnnnnnnnnnnnnnnnnnnnnnnnnnnnnnnnnnnnnnnnnnnnnnnnnnnnnnnnnnnnnnnnnnnnnnnnnnnnnnnnnnnnnnnnnnnnnnnnnnnnnnnnnnnnnnnnnnnnnnnnnnnnnnnnnnnnnnnnnnnnnnnnnnnnnnnnnnnnnnnnnnnnnnnnnnnnnnnnnnnnnnnnnnnnnnnnnnnnnnnnnnnnnnnnnnnnnnnnnnnnnnnnnnnnnnnnnnnnnnnnnnnnnnnnnnnnnnnnnnnnnnnnnnnnnnnnnnnnnnnnnnnnnnnnnnnnnnnnnnnnnnnnnnnnnnnnnnnnnnnnnnnnnnnnnnnnnnnnnnnnnnnnnnnnnnnnnnnnnnnnnnnnnnnnnnnnnnnnnnnnnnnnnnnnnnnnnnnnnnnnnnnnnnnnnnnnnnnnnnnnnnnnnnnnnnnnnnnnnnnnnnnnnnnnnnnnnnnnnnnnnnnnnnnnnnnnnnnnnnnnnnnnnnnnnnnnnnnnnnnnnnnnnnnnnnnnnnnnnnnnnnnnnnnnnnnnnnnnnnnnnnnnnnnnnnnnnnnnnnnnnnnnnnnnnnnnnnnnnnnnnnnnnnnnnnnnnnnnnnnnnnnnnnnnnnnnnnnnnnnnnnnnnnnnnnnnnnnnnnnnnnnnnnnnnnnnnnnnnnnnnnnnnnnnnnnnnnnnnnnnnnnnnnnnnnnnnnnnnnnnnnnnnnnnnnnnnnnnnnnnnnnnnnnnnnnnnnnnnnnnnnnnnnnnnnnnnnnnnnnnnnnnnnnnnnnnnnnnnnnnnnnnnnnnnnnnnnnnnnnnnnnnnnnnnnnnnnnnnnnnnnnnnnnnnnnnnnnnnnnnnnnnnnnnnnnnnnnnnnnnnnnnnnnnnnnnnnnnnnnnnnnnnnnnnnnnnnnnnnnnnnnnnnnnnnnnnnnnnnnnnnnnnnnnnnnnnnnnnnnnnnnnnnnnnnnnnnnnnnnnnnnnnnnnnnnnnnnnnnnnnnnnnnnnnnnnnnnnnnnnnnnnnnnnnnnnnnnnnnnnnnnnnnnnnnnnnnnnnnnnnnnnnnnnnnnnnnnnnnnnnnnnnnnnnnnnnnnnnnnnnnnnnnnnnnnnnnnnnnnnnnnnnnnnnnnnnnnnnnnnnnnnnnnnnnnnnnnnnnnnnnnnnnnnnnnnnnnnnnnnnnnnnnnnnnnnnnnnnnnnnnnnnnnnnnnnnnnnnnnnnnnnnnnnnnnnnnnnnnnnnnnnnnnnnnnnnnnnnnnnnnnnnnnnnnnnnnnnnnnnnnnnnnnnnnnnnnnnnnnnnnnnnnnnnnnnnnnnnnnnnnnnnnnnnnnnnnnnnnnnnnnnnnnnnnnnnnnnnnnnnnnnnnnnnnnnnnnnnnnnnnnnnnnnnnnnnnnnnnnnnnnnnnnnnnnnnnnnnnnnnnnnnnnnnnnnnnnnnnnnnnnnnnnnnnnnnnnnnnnnnnnnnnnnnnnnnnnnnnnnnnnnnnnnnnnnnnnnnnnnnnnnnnnnnnnnnnnnnnnnnnnnnnnnnnnnnnnnnnnnnnnnnnnnnnnnnnnnnnnnnnnnnnnnnnnnnnnnnnnnnnnnnnnnnnnnnnnnnnnnnnnnnnnnnnnnnnnnnnnnnnnnnnnnnnnnnnnnnnnnnnnnnnnnnnnnnnnnnnnnnnnnnnnnnnnnnnnnnnnnnnnnnnnnnnnnnnnnnnnnnnnnnnnnnnnnnnnnnnnnnnnnnnnnnnnnnnnnnnnnnnnnnnnnnnnnnnnnnnnnnnnnnnnnnnnnnnnnnnnnnnnnnnnnnnnnnnnnnnnnnnnnnnnnnnnnnnnnnnnnnnnnnnnnnnnnnnnnnnnnnnnnnnnnnnnnnnnnnnnnnnnnnnnnnnnnnnnnnnnnnnnnnnnnnnnnnnnnnnnnnnnnnnnnnnnnnnnnnnnnnnnnnnnnnnnnnnnnnnnnnnnnnnnnnnnnnnnnnnnnnnnnnnnnnnnnnnnnnnnnnnnnnnnnnnnnnnnnnnnnnnnnnnnnnnnnnnnnnnnnnnnnnnnnnnnnnnnnnnnnnnnnnnnnnnnnnnnnnnnnnnnnnnnnnnnnnnnnnnnnnnnnnnnnnnnnnnnnnnnnnnnnnnnnnnnnnnnnnnnnnnnnnnnnnnnnnnnnnnnnnnnnnnnnnnnnnnnnnnnnnnnnnnnnnnnnnnnnnnnnnnnnnnnnnnnnnnnnnnnnnnnnnnnnnnnnnnnnnnnnnnnnnnnnnnnnnnnnnnnnnnnnnnnnnnnnnnnnnnnnnnnnnnnnnnnnnnnnnnnnnnnnnnnnnnnnnnnnnnnnnnnnnnnnnnnnnnnnnnnnnnnnnnnnnnnnnnnnnnnnnnnnnnnnnnnnnnnnnnnnnnnnnnnnnnnnnnnnnnnnnnnnnnnnnnnnnnnnnnnnnnnnnnnnnnnnnnnnnnnnnnnnnnnnnnnnnnnnnnnnnnnnnnnnnnnnnnnnnnnnnnnnnnnnnnnnnnnnnnnnnnnnnnnnnnnnnnnnnnnnnnnnnnnnnnnnnnnnnnnnnnnnnnnnnnnnnnnnnnnnnnnnnnnnnnnnnnnnnnnnnnnnnnnnnnnnnnnnnnnnnnnnnnnnnnnnnnnnnnnnnnnnnnnnnnnnnnnnnnnnnnnnnnnnnnnnnnnnnnnnnnnnnnnnnnnnnnnnnnnnnnnnnnnnnnnnnnnnnnnnnnnnnnnnnnnnnnnnnnnnnnnnnnnnnnnnnnnnnnnnnnnnnnnnnnnnnnnnnnnnnnnnnnnnnnnnnnnnnnnnnnnnnnnnnnnnnnnnnnnnnnnnnnnnnnnnnnnnnnnnnnnnnnnnnnnnnnnnnnnnnnnnnnnnnnnnnnnnnnnnnnnnnnnnnnnnnnnnnnnnnnnnnnnnnnnnnnnnnnnnnnnnnnnnnnnnnnnnnnnnnnnnnnnnnnnnnnnnnnnnnnnnnnnnnnnnnnnnnnnnnnnnnnnnnnnnnnnnnnnnnnnnnnnnnnnnnnnnnnnnnnnnnnnnnnnnnnnnnnnnnnnnnnnnnnnnnnnnnnnnnnnnnnnnnnnnnnnnnnnnnnnnnnnnnnnnnnnnnnnnnnnnnnnnnnnnnnnnnnnnnnnnnnnnnnnnnnnnnnnnnnnnnnnnnnnnnnnnnnnnnnnnnnnnnnnnnnnnnnnnnnnnnnnnnnnnnnnnnnnnnnnnnnnnnnnnnnnnnnnnnnnnnnnnnnnnnnnnnnnnnnnnnnnnnnnnnnnnnnnnnnnnnnnnnnnnnnnnnnnnnnnnnnnnnnnnnnnnnnnnnnnnnnnnnnnnnnnnnnnnnnnnnnnnnnnnnnnnnnnnnnnnnnnnnnnnnnnnnnnnnnnnnnnnnnnnnnnnnnnnnnnnnnnnnnnnnnnnnnnnnnnnnnnnnnnnnnnnnnnnnnnnnnnnnnnnnnnnnnnnnnnnnnnnnnnnnnnnnnnnnnnnnnnnnnnnnnnnnnnnnnnnnnnnnnnnnnnnnnnnnnnnnnnnnnnnnnnnnnnnnnnnnnnnnnnnnnnnnnnnnnnnnnnnnnnnnnnnnnnnnnnnnnnnnnnnnnnnnnnnnnnnnnnnnnnnnnnnnnnnnnnnnnnnnnnnnnnnnnnnnnnnnnnnnnnnnnnnnnnnnnnnnnnnnnnnnnnnnnnnnnnnnnnnnnnnnnnnnnnnnnnnnnnnnnnnnnnnnnnnnnnnnnnnnnnnnnnnnnnnnnnnnnnnnnnnnnnnnnnnnnnnnnnnnnnnnnnnnnnnnnnnnnnnnnnnnnnnnnnnnnnnnnnnnnnnnnnnnnnnnnnnnnnnnnnnnnnnnnnnnnnnnnnnnnnnnnnnnnnnnnnnnnnnnnnnnnnnnnnnnnnnnnnnnnnnnnnnnnnnnnnnnnnnnnnnnnnnnnnnnnnnnnnnnnnnnnnnnnnnnnnnnnnnnnnnnnnnnnnnnnnnnnnnnnnnnnnnnnnnnnnnnnnnnnnnnnnnnnnnnnnnnnnnnnnnnnnnnnnnnnnnnnnnnnnnnnnnnnnnnnnnnnnnnnnnnnnnnnnnnnnnnnnnnnnnnnnnnnnnnnnnnnnnnnnnnnnnnnnnnnnnnnnnnnnnnnnnnnnnnnnnnnnnnnnnnnnnnnnnnnnnnnnnnnnnnnnnnnnnnnnnnnnnnnnnnnnnnnnnnnnnnnnnnnnnnnnnnnnnnnnnnnnnnnnnnnnnnnnnnnnnnnnnnnnnnnnnnnnnnnnnnnnnnnnnnnnnnnnnnnnnnnnnnnnnnnnnnnnnnnnnnnnnnnnnnnnnnnnnnnnnnnnnnnnnnnnnnnnnnnnnnnnnnnnnnnnnnnnnnnnnnnnnnnnnnnnnnnnnnnnnnnnnnnnnnnnnnnnnnnnnnnnnnnnnnnnnnnnnnnnnnnnnnnnnnnnnnnnnnnnnnnnnnnnnnnnnnnnnnnnnnnnnnnnnnnnnnnnnnnnnnnnnnnnnnnnnnnnnnnnnnnnnnnnnnnnnnnnnnnnnnnnnnnnnnnnnnnnnnnnnnnnnnnnnnnnnnnnnnnnnnnnnnnnnnnnnnnnnnnnnnnnnnnnnnnnnnnnnnnnnnnnnnnnnnnnnnnnnnnnnnnnnnnnnnnnnnnnnnnnnnnnnnnnnnnnnnnnnnnnnnnnnnnnnnnnnnnnnnnnnnnnnnnnnnnnnnnnnnnnnnnnnnnnnnnnnnnnnnnnnnnnnnnnnnnnnnnnnnnnnnnnnnnnnnnnnnnnnnnnnnnnnnnnnnnnnnnnnnnnnnnnnnnnnnnnnnnnnnnnnnnnnnnnnnnnnnnnnnnnnnnnnnnnnnnnnnnnnnnnnnnnnnnnnnnnnnnnnnnnnnnnnnnnnnnnnnnnnnnnnnnnnnnnnnnnnnnnnnnnnnnnnnnnnnnnnnnnnnnnnnnnnnnnnnnnnnnnnnnnnnnnnnnnnnnnnnnnnnnnnnnnnnnnnnnnnnnnnnnnnnnnnnnnnnnnnnnnnnnnnnnnnnnnnnnnnnnnnnnnnnnnnnnnnnnnnnnnnnnnnnnnnnnnnnnnnnnnnnnnnnnnnnnnnnnnnnnnnnnnnnnnnnnnnnnnnnnnnnnnnnnnnnnnnnnnnnnnnnnnnnnnnnnnnnnnnnnnnnnnnnnnnnnnnnnnnnnnnnnnnnnnnnnnnnnnnnnnnnnnnnnnnnnnnnnnnnnnnnnnnnnnnnnnnnnnnnnnnnnnnnnnnnnnnnnnnnnnnnnnnnnnnnnnnnnnnnnnnnnnnnnnnnnnnnnnnnnnnnnnnnnnnnnnnnnnnnnnnnnnnnnnnnnnnnnnnnnnnnnnnnnnnnnnnnnnnnnnnnnnnnnnnnnnnnnnnnnnnnnnnnnnnnnnnnnnnnnnnnnnnnnnnnnnnnnnnnnnnnnnnnnnnnnnnnnnnnnnnnnnnnnnnnnnnnnnnnnnnnnnnnnnnnnnnnnnnnnnnnnnnnnnnnnnnnnnnnnnnnnnnnnnnnnnnnnnnnnnnnnnnnnnnnnnnnnnnnnnnnnnnnnnnnnnnnnnnnnnnnnnnnnnnnnnnnnnnnnnnnnnnnnnnnnnnnnnnnnnnnnnnnnnnnnnnnnnnnnnnnnnnnnnnnnnnnnnnnnnnnnnnnnnnnnnnnnnnnnnnnnnnnnnnnnnnnnnnnnnnnnnnnnnnnnnnnnnnnnnnnnnnnnnnnnnnnnnnnnnnnnnnnnnnnnnnnnnnnnnnnnnnnnnnnnnnnnnnnnnnnnnnnnnnnnnnnnnnnnnnnnnnnnnnnnnnnnnnnnnnnnnnnnnnnnnnnnnnnnnnnnnnnnnnnnnnnnnnnnnnnnnnnnnnnnnnnnnnnnnnnnnnnnnnnnnnnnnnnnnnnnnnnnnnnnnnnnnnnnnnnnnnnnnnnnnnnnnnnnnnnnnnnnnnnnnnnnnnnnnnnnnnnnnnnnnnnnnnnnnnnnnnnnnnnnnnnnnnnnnnnnnnnnnnnnnnnnnnnnnnnnnnnnnnnnnnnnnnnnnnnnnnnnnnnnnnnnnnnnnnnnnnnnnnnnnnnnnnnnnnnnnnnnnnnnnnnnnnnnnnnnnnnnnnnnnnnnnnnnnnnnnnnnnnnnnnnnnnnnnnnnnnnnnnnnnnnnnnnnnnnnnnnnnnnnnnnnnnnnnnnnnnnnnnnnnnnnnnnnnnnnnnnnnnnnnnnnnnnnnnnnnnnnnnnnnnnnnnnnnnnnnnnnnnnnnnnnnnnnnnnnnnnnnnnnnnnnnnnnnnnnnnnnnnnnnnnnnnnnnnnnnnnnnnnnnnnnnnnnnnnnnnnnnnnnnnnnnnnnnnnnnnnnnnnnnnnnnnnnnnnnnnnnnnnnnnnnnnnnnnnnnnnnnnnnnnnnnnnnnnnnnnnnnnnnnnnnnnnnnnnnnnnnnnnnnnnnnnnnnnnnnnnnnnnnnnnnnnnnnnnnnnnnnnnnnnnnnnnnnnnnnnnnnnnnnnnnnnnnnnnnnnnnnnnnnnnnnnnnnnnnnnnnnnnnnnnnnnnnnnnnnnnnnnnnnnnnnnnnnnnnnnnnnnnnnnnnnnnnnnnnnnnnnnnnnnnnnnnnnnnnnnnnnnnnnnnnnnnnnnnnnnnnnnnnnnnnnnnnnnnnnnnnnnnnnnnnnnnnnnnnnnnnnnnnnnnnnnnnnnnnnnnnnnnnnnnnnnnnnnnnnnnnnnnnnnnnnnnnnnnnnnnnnnnnnnnnnnnnnnnnnnnnnnnnnnnnnnnnnnnnnnnnnnnnnnnnnnnnnnnnnnnnnnnnnnnnnnnnnnnnnnnnnnnnnnnnnnnnnnnnnnnnnnnnnnnnnnnnnnnnnnnnnnnnnnnnnnnnnnnnnnnnnnnnnnnnnnnnnnnnnnnnnnnnnnnnnnnnnnnnnnnnnnnnnnnnnnnnnnnnnnnnnnnnnnnnnnnnnnnnnnnnnnnnnnnnnnnnnnnnnnnnnnnnnnnnnnnnnnnnnnnnnnnnnnnnnnnnnnnnnnnnnnnnnnnnnnnnnnnnnnnnnnnnnnnnnnnnnnnnnnnnnnnnnnnnnnnnnnnnnnnnnnnnnnnnnnnnnnnnnnnnnnnnnnnnnnnnnnnnnnnnnnnnnnnnnnnnnnnnnnnnnnnnnnnnnnnnnnnnnnnnnnnnnnnnnnnnnnnnnnnnnnnnnnnnnnnnnnnnnnnnnnnnnnnnnnnnnnnnnnnnnnnnnnnnnnnnnnnnnnnnnnnnnnnnnnnnnnnnnnnnnnnnnnnnnnnnnnnnnnnnnnnnnnnnnnnnnnnnnnnnnnnnnnnnnnnnnnnnnnnnnnnnnnnnnnnnnnnnnnnnnnnnnnnnnnnnnnnnnnnnnnnnnnnnnnnnnnnnnnnnnnnnnnnnnnnnnnnnnnnnnnnnnnnnnnnnnnnnnnnnnnnnnnnnnnnnnnnnnnnnnnnnnnnnnnnnnnnnnnnnnnnnnnnnnnnnnnnnnnnnnnnnnnnnnnnnnnnnnnnnnnnnnnnnnnnnnnnnnnnnnnnnnnnnnnnnnnnnnnnnnnnnnnnnnnnnnnnnnnnnnnnnnnnnnnnnnnnnnnnnnnnnnnnnnnnnnnnnnnnnnnnnnnnnnnnnnnnnnnnnnnnnnnnnnnnnnnnnnnnnnnnnnnnnnnnnnnnnnnnnnnnnnnnnnnnnnnnnnnnnnnnnnnnnnnnnnnnnnnnnnnnnnnnnnnnnnnnnnnnnnnnnnnnnnnnnnnnnnnnnnnnnnnnnnnnnnnnnnnnnnnnnnnnnnnnnnnnnnnnnnnnnnnnnnnnnnnnnnnnnnnnnnnnnnnnnnnnnnnnnnnnnnnnnnnnnnnnnnnnnnnnnnnnnnnnnnnnnnnnnnnnnnnnnnnnnnnnnnnnnnnnnnnnnnnnnnnnnnnnnnnnnnnnnnnnnnnnnnnnnnnnnnnnnnnnnnnnnnnnnnnnnnnnnnnnnnnnnnnnnnnnnnnnnnnnnnnnnnnnnnnnnnnnnnnnnnnnnnnnnnnnnnnnnnnnnnnnnnnnnnnnnnnnnnnnnnnnnnnnnnnnnnnnnnnnnnnnnnnnnnnnnnnnnnnnnnnnnnnnnnnnnnnnnnnnnnnnnnnnnnnnnnnnnnnnnnnnnnnnnnnnnnnnnnnnnnnnnnnnnnnnnnnnnnnnnnnnnnnnnnnnnnnnnnnnnnnnnnnnnnnnnnnnnnnnnnnnnnnnnnnnnnnnnnnnnnnnnnnnnnnnnnnnnnnnnnnnnnnnnnnnnnnnnnnnnnnnnnnnnnnnnnnnnnnnnnnnnnnnnnnnnnnnnnnnnnnnnnnnnnnnnnnnnnnnnnnnnnnnnnnnnnnnnnnnnnnnnnnnnnnnnnnnnnnnnnnnnnnnnnnnnnnnnnnnnnnnnnnnnnnnnnnnnnnnnnnnnnnnnnnnnnnnnnnnnnnnnnnnnnnnnnnnnnnnnnnnnnnnnnnnnnnnnnnnnnnnnnnnnnnnnnnnnnnnnnnnnnnnnnnnnnnnnnnnnnnnnnnnnnnnnnnnnnnnnnnnnnnnnnnnnnnnnnnnnnnnnnnnnnnnnnnnnnnnnnnnnnnnnnnnnnnnnnnnnnnnnnnnnnnnnnnnnnnnnnnnnnnnnnnnnnnnnnnnnnnnnnnnnnnnnnnnnnnnnnnnnnnnnnnnnnnnnnnnnnnnnnnnnnnnnnnnnnnnnnnnnnnnnnnnnnnnnnnnnnnnnnnnnnnnnnnnnnnnnnnnnnnnnnnnnnnnnnnnnnnnnnnnnnnnnnnnnnnnnnnnnnnnnnnnnnnnnnnnnnnnnnnnnnnnnnnnnnnnnnnnnnnnnnnnnnnnnnnnnnnnnnnnnnnnnnnnnnnnnnnnnnnnnnnnnnnnnnnnnnnnnnnnnnnnnnnnnnnnnnnnnnnnnnnnnnnnnnnnnnnnnnnnnnnnnnnnnnnnnnnnnnnnnnnnnnnnnnnnnnnnnnnnnnnnnnnnnnnnnnnnnnnnnnnnnnnnnnnnnnnnnnnnnnnnnnnnnnnnnnnnnnnnnnnnnnnnnnnnnnnnnnnnnnnnnnnnnnnnnnnnnnnnnnnnnnnnnnnnnnnnnnnnnnnnnnnnnnnnnnnnnnnnnnnnnnnnnnnnnnnnnnnnnnnnnnnnnnnnnnnnnnnnnnnnnnnnnnnnnnnnnnnnnnnnnnnnnnnnnnnnnnnnnnnnnnnnnnnnnnnnnnnnnnnnnnnnnnnnnnnnnnnnnnnnnnnnnnnnnnnnnnnnnnnnnnnnnnnnnnnnnnnnnnnnnnnnnnnnnnnnnnnnnnnnnnnnnnnnnnnnnnnnnnnnnnnnnnnnnnnnnnnnnnnnnnnnnnnnnnnnnnnnnnnnnnnnnnnnnnnnnnnnnnnnnnnnnnnnnnnnnnnnnnnnnnnnnnnnnnnnnnnnnnnnnnnnnnnnnnnnnnnnnnnnnnnnnnnnnnnnnnnnnnnnnnnnnnnnnnnnnnnnnnnnnnnnnnnnnnnnnnnnnnnnnnnnnnnnnnnnnnnnnnnnnnnnnnnnnnnnnnnnnnnnnnnnnnnnnnnnnnnnnnnnnnnnnnnnnnnnnnnnnnnnnnnnnnnnnnnnnnnnnnnnnnnnnnnnnnnnnnnnnnnnnnnnnnnnnnnnnnnnnnnnnnnnnnnnnnnnnnnnnnnnnnnnnnnnnnnnnnnnnnnnnnnnnnnnnnnnnnnnnnnnnnnnnnnnnnnnnnnnnnnnnnnnnnnnnnnnnnnnnnnnnnnnnnnnnnnnnnnnnnnnnnnnnnnnnnnnnnnnnnnnnnnnnnnnnnnnnnnnnnnnnnnnnnnnnnnnnnnnnnnnnnnnnnnnnnnnnnnnnnnnnnnnnnnnnnnnnnnnnnnnnnnnnnnnnnnnnnnnnnnnnnnnnnnnnnnnnnnnnnnnnnnnnnnnnnnnnnnnnnnnnnnnnnnnnnnnnnnnnnnnnnnnnnnnnnnnnnnnnnnnnnnnnnnnnnnnnnnnnnnnnnnnnnnnnnnnnnnnnnnnnnnnnnnnnnnnnnnnnnnnnnnnnnnnnnnnnnnnnnnnnnnnnnnnnnnnnnnnnnnnnnnnnnnnnnnnnnnnnnnnnnnnnnnnnnnnnnnnnnnnnnnnnnnnnnnnnnnnnnnnnnnnnnnnnnnnnnnnnnnnnnnnnnnnnnnnnnnnnnnnnnnnnnnnnnnnnnnnnnnnnnnnnnnnnnnnnnnnnnnnnnnnnnnnnnnnnnnnnnnnnnnnnnnnnnnnnnnnnnnnnnnnnnnnnnnnnnnnnnnnnnnnnnnnnnnnnnnnnnnnnnnnnnnnnnnnnnnnnnnnnnnnnnnnnnnnnnnnnnnnnnnnnnnnnnnnnnnnnnnnnnnnnnnnnnnnnnnnnnnnnnnnnnnnnnnnnnnnnnnnnnnnnnnnnnnnnnnnnnnnnnnnnnnnnnnnnnnnnnnnnnnnnnnnnnnnnnnnnnnnnnnnnnnnnnnnnnnnnnnnnnnnnnnnnnnnnnnnnnnnnnnnnnnnnnnnnnnnnnnnnnnnnnnnnnnnnnnnnnnnnnnnnnnnnnnnnnnnnnnnnnnnnnnnnnnnnnnnnnnnnnnnnnnnnnnnnnnnnnnnnnnnnnnnnnnnnnnnnnnnnnnnnnnnnnnnnnnnnnnnnnnnnnnnnnnnnnnnnnnnnnnnnnnnnnnnnnnnnnnnnnnnnnnnnnnnnnnnnnnnnnnnnnnnnnnnnnnnnnnnnnnnnnnnnnnnnnnnnnnnnnnnnnnnnnnnnnnnnnnnnnnnnnnnnnnnnnnnnnnnnnnnnnnnnnnnnnnnnnnnnnnnnnnnnnnnnnnnnnnnnnnnnnnnnnnnnnnnnnnnnnnnnnnnnnnnnnnnnnnnnnnnnnnnnnnnnnnnnnnnnnnnnnnnnnnnnnnnnnnnnnnnnnnnnnnnnnnnnnnnnnnnnnnnnnnnnnnnnnnnnnnnnnnnnnnnnnnnnnnnnnnnnnnnnnnnnnnnnnnnnnnnnnnnnnnnnnnnnnnnnnnnnnnnnnnnnnnnnnnnnnnnnnnnnnnnnnnnnnnnnnnnnnnnnnnnnnnnnnnnnnnnnnnnnnnnnnnnnnnnnnnnnnnnnnnnnnnnnnnnnnnnnnnnnnnnnnnnnnnnnnnnnnnnnnnnnnnnnnnnnnnnnnnnnnnnnnnnnnnnnnnnnnnnnnnnnnnnnnnnnnnnnnnnnnnnnnnnnnnnnnnnnnnnnnnnnnnnnnnnnnnnnnnnnnnnnnnnnnnnnnnnnnnnnnnnnnnnnnnnnnnnnnnnnnnnnnnnnnnnnnnnnnnnnnnnnnnnnnnnnnnnnnnnnnnnnnnnnnnnnnnnnnnnnnnnnnnnnnnnnnnnnnnnnnnnnnnnnnnnnnnnnnnnnnnnnnnnnnnnnnnnnnnnnnnnnnnnnnnnnnnnnnnnnnnnnnnnnnnnnnnnnnnnnnnnnnnnnnnnnnnnnnnnnnnnnnnnnnnnnnnnnnnnnnnnnnnnnnnnnnnnnnnnnnnnnnnnnnnnnnnnnnnnnnnnnnnnnnnnnnnnnnnnnnnnnnnnnnnnnnnnnnnnnnnnnnnnnnnnnnnnnnnnnnnnnnnnnnnnnnnnnnnnnnnnnnnnnnnnnnnnnnnnnnnnnnnnnnnnnnnnnnnnnnnnnnnnnnnnnnnnnnnnnnnnnnnnnnnnnnnnnnnnnnnnnnnnnnnnnnnnnnnnnnnnnnnnnnnnnnnnnnnnnnnnnnnnnnnnnnnnnnnnnnnnnnnnnnnnnnnnnnnnnnnnnnnnnnnnnnnnnnnnnnnnnnnnnnnnnnnnnnnnnnnnnnnnnnnnnnnnnnnnnnnnnnnnnnnnnnnnnnnnnnnnnnnnnnnnnnnnnnnnnnnnnnnnnnnnnnnnnnnnnnnnnnnnnnnnnnnnnnnnnnnnnnnnnnnnnnnnnnnnnnnnnnnnnnnnnnnnnnnnnnnnnnnnnnnnnnnnnnnnnnnnnnnnnnnnnnnnnnnnnnnnnnnnnnnnnnnnnnnnnnnnnnnnnnnnnnnnnnnnnnnnnnnnnnnnnnnnnnnnnnnnnnnnnnnnnnnnnnnnnnnnnnnnnnnnnnnnnnnnnnnnnnnnnnnnnnnnnnnnnnnnnnnnnnnnnnnnnnnnnnnnnnnnnnnnnnnnnnnnnnnnnnnnnnnnnnnnnnnnnnnnnnnnnnnnnnnnnnnnnnnnnnnnnnnnnnnnnnnnnnnnnnnnnnnnnnnnnnnnnnnnnnnnnnnnnnnnnnnnnnnnnnnnnnnnnnnnnnnnnnnnnnnnnnnnnnnnnnnnnnnnnnnnnnnnnnnnnnnnnnnnnnnnnnnnnnnnnnnnnnnnnnnnnnnnnnnnnnnnnnnnnnnnnnnnnnnnnnnnnnnnnnnnnnnnnnnnnnnnnnnnnnnnnnnnnnnnnnnnnnnnnnnnnnnnnnnnnnnnnnnnnnnnnnnnnnnnnnnnnnnnnnnnnnnnnnnnnnnnnnnnnnnnnnnnnnnnnnnnnnnnnnnnnnnnnnnnnnnnnnnnnnnnnnnnnnnnnnnnnnnnnnnnnnnnnnnnnnnnnnnnnnnnnnnnnnnnnnnnnnnnnnnnnnnnnnnnnnnnnnnnnnnnnnnnnnnnnnnnnnnnnnnnnnnnnnnnnnnnnnnnnnnnnnnnnnnnnnnnnnnnnnnnnnnnnnnnnnnnnnnnnnnnnnnnnnnnnnnnnnnnnnnnnnnnnnnnnnnnnnnnnnnnnnnnnnnnnnnnnnnnnnnnnnnnnnnnnnnnnnnnnnnnnnnnnnnnnnnnnnnnnnnnnnnnnnnnnnnnnnnnnnnnnnnnnnnnnnnnnnnnnnnnnnnnnnnnnnnnnnnnnnnnnnnnnnnnnnnnnnnnnnnnnnnnnnnnnnnnnnnnnnnnnnnnnnnnnnnnnnnnnnnnnnnnnnnnnnnnnnnnnnnnnnnnnnnnnnnnnnnnnnnnnnnnnnnnnnnnnnnnnnnnnnnnnnnnnnnnnnnnnnnnnnnnnnnnnnnnnnnnnnnnnnnnnnnnnnnnnnnnnnnnnnnnnnnnnnnnnnnnnnnnnnnnnnnnnnnnnnnnnnnnnnnnnnnnnnnnnnnnnnnnnnnnnnnnnnnnnnnnnnnnnnnnnnnnnnnnnnnnnnnnnnnnnnnnnnnnnnnnnnnnnnnnnnnnnnnnnnnnnnnnnnnnnnnnnnnnnnnnnnnnnnnnnnnnnnnnnnnnnnnnnnnnnnnnnnnnnnnnnnnnnnnnnnnnnnnnnnnnnnnnnnnnnnnnnnnnnnnnnnnnnnnnnnnnnnnnnnnnnnnnnnnnnnnnnnnnnnnnnnnnnnnnnnnnnnnnnnnnnnnnnnnnnnnnnnnnnnnnnnnnnnnnnnnnnnnnnnnnnnnnnnnnnnnnnnnnnnnnnnnnnnnnnnnnnnnnnnnnnnnnnnnnnnnnnnnnnnnnnnnnnnnnnnnnnnnnnnnnnnnnnnnnnnnnnnnnnnnnnnnnnnnnnnnnnnnnnnnnnnnnnnnnnnnnnnnnnnnnnnnnnnnnnnnnnnnnnnnnnnnnnnnnnnnnnnnnnnnnnnnnnnnnnnnnnnnnnnnnnnnnnnnnnnnnnnnnnnnnnnnnnnnnnnnnnnnnnnnnnnnnnnnnnnnnnnnnnnnnnnnnnnnnnnnnnnnnnnnnnnnnnnnnnnnnnnnnnnnnnnnnnnnnnnnnnnnnnnnnnnnnnnnnnnnnnnnnnnnnnnnnnnnnnnnnnnnnnnnnnnnnnnnnnnnnnnnnnnnnnnnnnnnnnnnnnnnnnnnnnnnnnnnnnnnnnnnnnnnnnnnnnnnnnnnnnnnnnnnnnnnnnnnnnnnnnnnnnnnnnnnnnnnnnnnnnnnnnnnnnnnnnnnnnnnnnnnnnnnnnnnnnnnnnnnnnnnnnnnnnnnnnnnnnnnnnnnnnnnnnnnnnnnnnnnnnnnnnnnnnnnnnnnnnnnnnnnnnnnnnnnnnnnnnnnnnnnnnnnnnnnnnnnnnnnnnnnnnnnnnnnnnnnnnnnnnnnnnnnnnnnnnnnnnnnnnnnnnnnnnnnnnnnnnnnnnnnnnnnnnnnnnnnnnnnnnnnnnnnnnnnnnnnnnnnnnnnnnnnnnnnnnnnnnnnnnnnnnnnnnnnnnnnnnnnnnnnnnnnnnnnnnnnnnnnnnnnnnnnnnnnnnnnnnnnnnnnnnnnnnnnnnnnnnnnnnnnnnnnnnnnnnnnnnnnnnnnnnnnnnnnnnnnnnnnnnnnnnnnnnnnnnnnnnnnnnnnnnnnnnnnnnnnnnnnnnnnnnnnnnnnnnnnnnnnnnnnnnnnnnnnnnnnnnnnnnnnnnnnnnnnnnnnnnnnnnnnnnnnnnnnnnnnnnnnnnnnnnnnnnnnnnnnnnnnnnnnnnnnnnnnnnnnnnnnnnnnnnnnnnnnnnnnnnnnnnnnnnnnnnnnnnnnnnnnnnnnnnnnnnnnnnnnnnnnnnnnnnnnnnnnnnnnnnnnnnnnnnnnnnnnnnnnnnnnnnnnnnnnnnnnnnnnnnnnnnnnnnnnnnnnnnnnnnnnnnnnnnnnnnnnnnnnnnnnnnnnnnnnnnnnnnnnnnnnnnnnnnnnnnnnnnnnnnnnnnnnnnnnnnnnnnnnnnnnnnnnnnnnnnnnnnnnnnnnnnnnnnnnnnnnnnnnnnnnnnnnnnnnnnnnnnnnnnnnnnnnnnnnnnnnnnnnnnnnnnnnnnnnnnnnnnnnnnnnnnnnnnnnnnnnnnnnnnnnnnnnnnnnnnnnnnnnnnnnnnnnnnnnnnnnnnnnnnnnnnnnnnnnnnnnnnnnnnnnnnnnnnnnnnnnnnnnnnnnnnnnnnnnnnnnnnnnnnnnnnnnnnnnnnnnnnnnnnnnnnnnnnnnnnnnnnnnnnnnnnnnnnnnnnnnnnnnnnnnnnnnnnnnnnnnnnnnnnnnnnnnnnnnnnnnnnnnnnnnnnnnnnnnnnnnnnnnnnnnnnnnnnnnnnnnnnnnnnnnnnnnnnnnnnnnnnnnnnnnnnnnnnnnnnnnnnnnnnnnnnnnnnnnnnnnnnnnnnnnnnnnnnnnnnnnnnnnnnnnnnnnnnnnnnnnnnnnnnnnnnnnnnnnnnnnnnnnnnnnnnnnnnnnnnnnnnnnnnnnnnnnnnnnnnnnnnnnnnnnnnnnnnnnnnnnnnnnnnnnnnnnnnnnnnnnnnnnnnnnnnnnnnnnnnnnnnnnnnnnnnnnnnnnnnnnnnnnnnnnnnnnnnnnnnnnnnnnnnnnnnnnnnnnnnnnnnnnnnnnnnnnnnnnnnnnnnnnnnnnnnnnnnnnnnnnnnnnnnnnnnnnnnnnnnnnnnnnnnnnnnnnnnnnnnnnnnnnnnnnnnnnnnnnnnnnnnnnnnnnnnnnnnnnnnnnnnnnnnnnnnnnnnnnnnnnnnnnnnnnnnnnnnnnnnnnnnnnnnnnnnnnnnnnnnnnnnnnnnnnnnnnnnnnnnnnnnnnnnnnnnnnnnnnnnnnnnnnnnnnnnnnnnnnnnnnnnnnnnnnnnnnnnnnnnnnnnnnnnnnnnnnnnnnnnnnnnnnnnnnnnnnnnnnnnnnnnnnnnnnnnnnnnnnnnnnnnnnnnnnnnnnnnnnnnnnnnnnnnnnnnnnnnnnnnnnnnnnnnnnnnnnnnnnnnnnnnnnnnnnnnnnnnnnnnnnnnnnnnnnnnnnnnnnnnnnnnnnnnnnnnnnnnnnnnnnnnnnnnnnnnnnnnnnnnnnnnnnnnnnnnnnnnnnnnnnnnnnnnnnnnnnnnnnnnnnnnnnnnnnnnnnnnnnnnnnnnnnnnnnnnnnnnnnnnnnnnnnnnnnnnnnnnnnnnnnnnnnnnnnnnnnnnnnnnnnnnnnnnnnnnnnnnnnnnnnnnnnnnnnnnnnnnnnnnnnnnnnnnnnnnnnnnnnnnnnnnnnnnnnnnnnnnnnnnnnnnnnnnnnnnnnnnnnnnnnnnnnnnnnnnnnnnnnnnnnnnnnnnnnnnnnnnnnnnnnnnnnnnnnnnnnnnnnnnnnnnnnnnnnnnnnnnnnnnnnnnnnnnnnnnnnnnnnnnnnnnnnnnnnnnnnnnnnnnnnnnnnnnnnnnnnnnnnnnnnnnnnnnnnnnnnnnnnnnnnnnnnnnnnnnnnnnnnnnnnnnnnnnnnnnnnnnnnnnnnnnnnnnnnnnnnnnnnnnnnnnnnnnnnnnnnnnnnnnnnnnnnnnnnnnnnnnnnnnnnnnnnnnnnnnnnnnnnnnnnnnnnnnnnnnnnnnnnnnnnnnnnnnnnnnnnnnnnnnnnnnnnnnnnnnnnnnnnnnnnnnnnnnnnnnnnnnnnnnnnnnnnnnnnnnnnnnnnnnnnnnnnnnnnnnnnnnnnnnnnnnnnnnnnnnnnnnnnnnnnnnnnnnnnnnnnnnnnnnnnnnnnnnnnnnnnnnnnnnnnnnnnnnnnnnnnnnnnnnnnnnnnnnnnnnnnnnnnnnnnnnnnnnnnnnnnnnnnnnnnnnnnnnnnnnnnnnnnnnnnnnnnnnnnnnnnnnnnnnnnnnnnnnnnnnnnnnnnnnnnnnnnnnnnnnnnnnnnnnnnnnnnnnnnnnnnnnnnnnnnnnnnnnnnnnnnnnnnnnnnnnnnnnnnnnnnnnnnnnnnnnnnnnnnnnnnnnnnnnnnnnnnnnnnnnnnnnnnnnnnnnnnnnnnnnnnnnnnnnnnnnnnnnnnnnnnnnnnnnnnnnnnnnnnnnnnnnnnnnnnnnnnnnnnnnnnnnnnnnnnnnnnnnnnnnnnnnnnnnnnnnnnnnnnnnnnnnnnnnnnnnnnnnnnnnnnnnnnnnnnnnnnnnnnnnnnnnnnnnnnnnnnnnnnnnnnnnnnnnnnnnnnnnnnnnnnnnnnnnnnnnnnnnnnnnnnnnnnnnnnnnnnnnnnnnnnnnnnnnnnnnnnnnnnnnnnnnnnnnnnnnnnnnnnnnnnnnnnnnnnnnnnnnnnnnnnnnnnnnnnnnnnnnnnnnnnnnnnnnnnnnnnnnnnnnnnnnnnnnnnnnnnnnnnnnnnnnnnnnnnnnnnnnnnnnnnnnnnnnnnnnnnnnnnnnnnnnnnnnnnnnnnnnnnnnnnnnnnnnnnnnnnnnnnnnnnnnnnnnnnnnnnnnnnnnnnnnnnnnnnnnnnnnnnnnnnnnnnnnnnnnnnnnnnnnnnnnnnnnnnnnnnnnnnnnnnnnnnnnnnnnnnnnnnnnnnnnnnnnnnnnnnnnnnnnnnnnnnnnnnnnnnnnnnnnnnnnnnnnnnnnnnnnnnnnnnnnnnnnnnnnnnnnnnnnnnnnnnnnnnnnnnnnnnnnnnnnnnnnnnnnnnnnnnnnnnnnnnnnnnnnnnnnnnnnnnnnnnnnnnnnnnnnnnnnnnnnnnnnnnnnnnnnnnnnnnnnnnnnnnnnnnnnnnnnnnnnnnnnnnnnnnnnnnnnnnnnnnnnnnnnnnnnnnnnnnnnnnnnnnnnnnnnnnnnnnnnnnnnnnnnnnnnnnnnnnnnnnnnnnnnnnnnnnnnnnnnnnnnnnnnnnnnnnnnnnnnnnnnnnnnnnnnnnnnnnnnnnnnnnnnnnnnnnnnnnnnnnnnnnnnnnnnnnnnnnnnnnnnnnnnnnnnnnnnnnnnnnnnnnnnnnnnnnnnnnnnnnnnnnnnnnnnnnnnnnnnnnnnnnnnnnnnnnnnnnnnnnnnnnnnnnnnnnnnnnnnnnnnnnnnnnnnnnnnnnnnnnnnnnnnnnnnnnnnnnnnnnnnnnnnnnnnnnnnnnnnnnnnnnnnnnnnnnnnnnnnnnnnnnnnnnnnnnnnnnnnnnnnnnnnnnnnnnnnnnnnnnnnnnnnnnnnnnnnnnnnnnnnnnnnnnnnnnnnnnnnnnnnnnnnnnnnnnnnnnnnnnnnnnnnnnnnnnnnnnnnnnnnnnnnnnnnnnnnnnnnnnnnnnnnnnnnnnnnnnnnnnnnnnnnnnnnnnnnnnnnnnnnnnnnnnnnnnnnnnnnnnnnnnnnnnnnnnnnnnnnnnnnnnnnnnnnnnnnnnnnnnnnnnnnnnnnnnnnnnnnnnnnnnnnnnnnnnnnnnnnnnnnnnnnnnnnnnnnnnnnnnnnnnnnnnnnnnnnnnnnnnnnnnnnnnnnnnnnnnnnnnnnnnnnnnnnnnnnnnnnnnnnnnnnnnnnnnnnnnnnnnnnnnnnnnnnnnnnnnnnnnnnnnnnnnnnnnnnnnnnnnnnnnnnnnnnnnnnnnnnnnnnnnnnnnnnnnnnnnnnnnnnnnnnnnnnnnnnnnnnnnnnnnnnnnnnnnnnnnnnnnnnnnnnnnnnnnnnnnnnnnnnnnnnnnnnnnnnnnnnnnnnnnnnnnnnnnnnnnnnnnnnnnnnnnnnnnnnnnnnnnnnnnnnnnnnnnnnnnnnnnnnnnnnnnnnnnnnnnnnnnnnnnnnnnnnnnnnnnnnnnnnnnnnnnnnnnnnnnnnnnnnnnnnnnnnnnnnnnnnnnnnnnnnnnnnnnnnnnnnnnnnnnnnnnnnnnnnnnnnnnnnnnnnnnnnnnnnnnnnnnnnnnnnnnnnnnnnnnnnnnnnnnnnnnnnnnnnnnnnnnnnnnnnnnnnnnnnnnnnnnnnnnnnnnnnnnnnnnnnnnnnnnnnnnnnnnnnnnnnnnnnnnnnnnnnnnnnnnnnnnnnnnnnnnnnnnnnnnnnnnnnnnnnnnnnnnnnnnnnnnnnnnnnnnnnnnnnnnnnnnnnnnnnnnnnnnnnnnnnnnnnnnnnnnnnnnnnnnnnnnnnnnnnnnnnnnnnnnnnnnnnnnnnnnnnnnnnnnnnnnnnnnnnnnnnnnnnnnnnnnnnnnnnnnnnnnnnnnnnnnnnnnnnnnnnnnnnnnnnnnnnnnnnnnnnnnnnnnnnnnnnnnnnnnnnnnnnnnnnnnnnnnnnnnnnnnnnnnnnnnnnnnnnnnnnnnnnnnnnnnnnnnnnnnnnnnnnnnnnnnnnnnnnnnnnnnnnnnnnnnnnnnnnnnnnnnnnnnnnnnnnnnnnnnnnnnnnnnnnnnnnnnnnnnnnnnnnnnnnnnnnnnnnnnnnnnnnnnnnnnnnnnnnnnnnnnnnnnnnnnnnnnnnnnnnnnnnnnnnnnnnnnnnnnnnnnnnnnnnnnnnnnnnnnnnnnnnnnnnnnnnnnnnnnnnnnnnnnnnnnnnnnnnnnnnnnnnnnnnnnnnnnnnnnnnnnnnnnnnnnnnnnnnnnnnnnnnnnnnnnnnnnnnnnnnnnnnnnnnnnnnnnnnnnnnnnnnnnnnnnnnnnnnnnnnnnnnnnnnnnnnnnnnnnnnnnnnnnnnnnnnnnnnnnnnnnnnnnnnnnnnnnnnnnnnnnnnnnnnnnnnnnnnnnnnnnnnnnnnnnnnnnnnnnnnnnnnnnnnnnnnnnnnnnnnnnnnnnnnnnnnnnnnnnnnnnnnnnnnnnnnnnnnnnnnnnnnnnnnnnnnnnnnnnnnnnnnnnnnnnnnnnnnnnnnnnnnnnnnnnnnnnnnnnnnnnnnnnnnnnnnnnnnnnnnnnnnnnnnnnnnnnnnnnnnnnnnnnnnnnnnnnnnnnnnnnnnnnnnnnnnnnnnnnnnnnnnnnnnnnnnnnnnnnnnnnnnnnnnnnnnnnnnnnnnnnnnnnnnnnnnnnnnnnnnnnnnnnnnnnnnnnnnnnnnnnnnnnnnnnnnnnnnnnnnnnnnnnnnnnnnnnnnnnnnnnnnnnnnnnnnnnnnnnnnnnnnnnnnnnnnnnnnnnnnnnnnnnnnnnnnnnnnnnnnnnnnnnnnnnnnnnnnnnnnnnnnnnnnnnnnnnnnnnnnnnnnnnnnnnnnnnnnnnnnnnnnnnnnnnnnnnnnnnnnnnnnnnnnnnnnnnnnnnnnnnnnnnnnnnnnnnnnnnnnnnnnnnnnnnnnnnnnnnnnnnnnnnnnnnnnnnnnnnnnnnnnnnnnnnnnnnnnnnnnnnnnnnnnnnnnnnnnnnnnnnnnnnnnnnnnnnnnnnnnnnnnnnnnnnnnnnnnnnnnnnnnnnnnnnnnnnnnnnnnnnnnnnnnnnnnnnnnnnnnnnnnnnnnnnnnnnnnnnnnnnnnnnnnnnnnnnnnnnnnnnnnnnnnnnnnnnnnnnnnnnnnnnnnnnnnnnnnnnnnnnnnnnnnnnnnnnnnnnnnnnnnnnnnnnnnnnnnnnnnnnnnnnnnnnnnnnnnnnnnnnnnnnnnnnnnnnnnnnnnnnnnnnnnnnnnnnnnnnnnnnnnnnnnnnnnnnnnnnnnnnnnnnnnnnnnnnnnnnnnnnnnnnnnnnnnnnnnnnnnnnnnnnnnnnnnnnnnnnnnnnnnnnnnnnnnnnnnnnnnnnnnnnnnnnnnnnnnnnnnnnnnnnnnnnnnnnnnnnnnnnnnnnnnnnnnnnnnnnnnnnnnnnnnnnnnnnnnnnnnnnnnnnnnnnnnnnnnnnnnnnnnnnnnnnnnnnnnnnnnnnnnnnnnnnnnnnnnnnnnnnnnnnnnnnnnnnnnnnnnnnnnnnnnnnnnnnnnnnnnnnnnnnnnnnnnnnnnnnnnnnnnnnnnnnnnnnnnnnnnnnnnnnnnnnnnnnnnnnnnnnnnnnnnnnnnnnnnnnnnnnnnnnnnnnnnnnnnnnnnnnnnnnnnnnnnnnnnnnnnnnnnnnnnnnnnnnnnnnnnnnnnnnnnnnnnnnnnnnnnnnnnnnnnnnnnnnnnnnnnnnnnnnnnnnnnnnnnnnnnnnnnnnnnnnnnnnnnnnnnnnnnnnnnnnnnnnnnnnnnnnnnnnnnnnnnnnnnnnnnnnnnnnnnnnnnnnnnnnnnnnnnnnnnnnnnnnnnnnnnnnnnnnnnnnnnnnnnnnnnnnnnnnnnnnnnnnnnnnnnnnnnnnnnnnnnnnnnnnnnnnnnnnnnnnnnnnnnnnnnnnnnnnnnnnnnnnnnnnnnnnnnnnnnnnnnnnnnnnnnnnnnnnnnnnnnnnnnnnnnnnnnnnnnnnnnnnnnnnnnnnnnnnnnnnnnnnnnnnnnnnnnnnnnnnnnnnnnnnnnnnnnnnnnnnnnnnnnnnnnnnnnnnnnnnnnnnnnnnnnnnnnnnnnnnnnnnnnnnnnnnnnnnnnnnnnnnnnnnnnnnnnnnnnnnnnnnnnnnnnnnnnnnnnnnnnnnnnnnnnnnnnnnnnnnnnnnnnnnnnnnnnnnnnnnnnnnnnnnnnnnnnnnnnnnnnnnnnnnnnnnnnnnnnnnnnnnnnnnnnnnnnnnnnnnnnnnnnnnnnnnnnnnnnnnnnnnnnnnnnnnnnnnnnnnnnnnnnnnnnnnnnnnnnnnnnnnnnnnnnnnnnnnnnnnnnnnnnnnnnnnnnnnnnnnnnnnnnnnnnnnnnnnnnnnnnnnnnnnnnnnnnnnnnnnnnnnnnnnnnnnnnnnnnnnnnnnnnnnnnnnnnnnnnnnnnnnnnnnnnnnnnnnnnnnnnnnnnnnnnnnnnnnnnnnnnnnnnnnnnnnnnnnnnnnnnnnnnnnnnnnnnnnnnnnnnnnnnnnnnnnnnnnnnnnnnnnnnnnnnnnnnnnnnnnnnnnnnnnnnnnnnnnnnnnnnnnnnnnnnnnnnnnnnnnnnnnnnnnnnnnnnnnnnnnnnnnnnnnnnnnnnnnnnnnnnnnnnnnnnnnnnnnnnnnnnnnnnnnnnnnnnnnnnnnnnnnnnnnnnnnnnnnnnnnnnnnnnnnnnnnnnnnnnnnnnnnnnnnnnnnnnnnnnnnnnnnnnnnnnnnnnnnnnnnnnnnnnnnnnnnnnnnnnnnnnnnnnnnnnnnnnnnnnnnnnnnnnnnnnnnnnnnnnnnnnnnnnnnnnnnnnnnnnnnnnnnnnnnnnnnnnnnnnnnnnnnnnnnnnnnnnnnnnnnnnnnnnnnnnnnnnnnnnnnnnnnnnnnnnnnnnnnnnnnnnnnnnnnnnnnnnnnnnnnnnnnnnnnnnnnnnnnnnnnnnnnnnnnnnnnnnnnnnnnnnnnnnnnnnnnnnnnnnnnnnnnnnnnnnnnnnnnnnnnnnnnnnnnnnnnnnnnnnnnnnnnnnnnnnnnnnnnnnnnnnnnnnnnnnnnnnnnnnnnnnnnnnnnnnnnnnnnnnnnnnnnnnnnnnnnnnnnnnnnnnnnnnnnnnnnnnnnnnnnnnnnnnnnnnnnnnnnnnnnnnnnnnnnnnnnnnnnnnnnnnnnnnnnnnnnnnnnnnnnnnnnnnnnnnnnnnnnnnnnnnnnnnnnnnnnnnnnnnnnnnnnnnnnnnnnnnnnnnnnnnnnnnnnnnnnnnnnnnnnnnnnnnnnnnnnnnnnnnnnnnnnnnnnnnnnnnnnnnnnnnnnnnnnnnnnnnnnnnnnnnnnnnnnnnnnnnnnnnnnnnnnnnnnnnnnnnnnnnnnnnnnnnnnnnnnnnnnnnnnnnnnnnnnnnnnnnnnnnnnnnnnnnnnnnnnnnnnnnnnnnnnnnnnnnnnnnnnnnnnnnnnnnnnnnnnnnnnnnnnnnnnnnnnnnnnnnnnnnnnnnnnnnnnnnnnnnnnnnnnnnnnnnnnnnnnnnnnnnnnnnnnnnnnnnnnnnnnnnnnnnnnnnnnnnnnnnnnnnnnnnnnnnnnnnnnnnnnnnnnnnnnnnnnnnnnnnnnnnnnnnnnnnnnnnnnnnnnnnnnnnnnnnnnnnnnnnnnnnnnnnnnnnnnnnnnnnnnnnnnnnnnnnnnnnnnnnnnnnnnnnnnnnnnnnnnnnnnnnnnnnnnnnnnnnnnnnnnnnnnnnnnnnnnnnnnnnnnnnnnnnnnnnnnnnnnnnnnnnnnnnnnnnnnnnnnnnnnnnnnnnnnnnnnnnnnnnnnnnnnnnnnnnnnnnnnnnnnnnnnnnnnnnnnnnnnnnnnnnnnnnnnnnnnnnnnnnnnnnnnnnnnnnnnnnnnnnnnnnnnnnnnnnnnnnnnnnnnnnnnnnnnnnnnnnnnnnnnnnnnnnnnnnnnnnnnnnnnnnnnnnnnnnnnnnnnnnnnnnnnnnnnnnnnnnnnnnnnnnnnnnnnnnnnnnnnnnnnnnnnnnnnnnnnnnnnnnnnnnnnnnnnnnnnnnnnnnnnnnnnnnnnnnnnnnnnnnnnnnnnnnnnnnnnnnnnnnnnnnnnnnnnnnnnnnnnnnnnnnnnnnnnnnnnnnnnnnnnnnnnnnnnnnnnnnnnnnnnnnnnnnnnnnnnnnnnnnnnnnnnnnnnnnnnnnnnnnnnnnnnnnnnnnnnnnnnnnnnnnnnnnnnnnnnnnnnnnnnnnnnnnnnnnnnnnnnnnnnnnnnnnnnnnnnnnnnnnnnnnnnnnnnnnnnnnnnnnnnnnnnnnnnnnnnnnnnnnnnnnnnnnnnnnnnnnnnnnnnnnnnnnnnnnnnnnnnnnnnnnnnnnnnnnnnnnnnnnnnnnnnnnnnnnnnnnnnnnnnnnnnnnnnnnnnnnnnnnnnnnnnnnnnnnnnnnnnnnnnnnnnnnnnnnnnnnnnnnnnnnnnnnnnnnnnnnnnnnnnnnnnnnnnnnnnnnnnnnnnnnnnnnnnnnnnnnnnnnnnnnnnnnnnnnnnnnnnnnnnnnnnnnnnnnnnnnnnnnnnnnnnnnnnnnnnnnnnnnnnnnnnnnnnnnnnnnnnnnnnnnnnnnnnnnnnnnnnnnnnnnnnnnnnnnnnnnnnnnnnnnnnnnnnnnnnnnnnnnnnnnnnnnnnnnnnnnnnnnnnnnnnnnnnnnnnnnnnnnnnnnnnnnnnnnnnnnnnnnnnnnnnnnnnnnnnnnnnnnnnnnnnnnnnnnnnnnnnnnnnnnnnnnnnnnnnnnnnnnnnnnnnnnnnnnnnnnnnnnnnnnnnnnnnnnnnnnnnnnnnnnnnnnnnnnnnnnnnnnnnnnnnnnnnnnnnnnnnnnnnnnnnnnnnnnnnnnnnnnnnnnnnnnnnnnnnnnnnnnnnnnnnnnnnnnnnnnnnnnnnnnnnnnnnnnnnnnnnnnnnnnnnnnnnnnnnnnnnnnnnnnnnnnnnnnnnnnnnnnnnnnnnnnnnnnnnnnnnnnnnnnnnnnnnnnnnnnnnnnnnnnnnnnnnnnnnnnnnnnnnnnnnnnnnnnnnnnnnnnnnnnnnnnnnnnnnnnnnnnnnnnnnnnnnnnnnnnnnnnnnnnnnnnnnnnnnnnnnnnnnnnnnnnnnnnnnnnnnnnnnnnnnnnnnnnnnnnnnnnnnnnnnnnnnnnnnnnnnnnnnnnnnnnnnnnnnnnnnnnnnnnnnnnnnnnnnnnnnnnnnnnnnnnnnnnnnnnnnnnnnnnnnnnnnnnnnnnnnnnnnnnnnnnnnnnnnnnnnnnnnnnnnnnnnnnnnnnnnnnnnnnnnnnnnnnnnnnnnnnnnnnnnnnnnnnnnnnnnnnnnnnnnnnnnnnnnnnnnnnnnnnnnnnnnnnnnnnnnnnnnnnnnnnnnnnnnnnnnnnnnnnnnnnnnnnnnnnnnnnnnnnnnnnnnnnnnnnnnnnnnnnnnnnnnnnnnnnnnnnnnnnnnnnnnnnnnnnnnnnnnnnnnnnnnnnnnnnnnnnnnnnnnnnnnnnnnnnnnnnnnnnnnnnnnnnnnnnnnnnnnnnnnnnnnnnnnnnnnnnnnnnnnnnnnnnnnnnnnnnnnnnnnnnnnnnnnnnnnnnnnnnnnnnnnnnnnnnnnnnnnnnnnnnnnnnnnnnnnnnnnnnnnnnnnnnnnnnnnnnnnnnnnnnnnnnnnnnnnnnnnnnnnnnnnnnnnnnnnnnnnnnnnnnnnnnnnnnnnnnnnnnnnnnnnnnnnnnnnnnnnnnnnnnnnnnnnnnnnnnnnnnnnnnnnnnnnnnnnnnnnnnnnnnnnnnnnnnnnnnnnnnnnnnnnnnnnnnnnnnnnnnnnnnnnnnnnnnnnnnnnnnnnnnnnnnnnnnnnnnnnnnnnnnnnnnnnnnnnnnnnnnnnnnnnnnnnnnnnnnnnnnnnnnnnnnnnnnnnnnnnnnnnnnnnnnnnnnnnnnnnnnnnnnnnnnnnnnnnnnnnnnnnnnnnnnnnnnnnnnnnnnnnnnnnnnnnnnnnnnnnnnnnnnnnnnnnnnnnnnnnnnnnnnnnnnnnnnnnnnnnnnnnnnnnnnnnnnnnnnnnnnnnnnnnnnnnnnnnnnnnnnnnnnnnnnnnnnnnnnnnnnnnnnnnnnnnnnnnnnnnnnnnnnnnnnnnnnnnnnnnnnnnnnnnnnnnnnnnnnnnnnnnnnnnnnnnnnnnnnnnnnnnnnnnnnnnnnnnnnnnnnnnnnnnnnnnnnnnnnnnnnnnnnnnnnnnnnnnnnnnnnnnnnnnnnnnnnnnnnnnnnnnnnnnnnnnnnnnnnnnnnnnnnnnnnnnnnnnnnnnnnnnnnnnnnnnnnnnnnnnnnnnnnnnnnnnnnnnnnnnnnnnnnnnnnnnnnnnnnnnnnnnnnnnnnnnnnnnnnnnnnnnnnnnnnnnnnnnnnnnnnnnnnnnnnnnnnnnnnnnnnnnnnnnnnnnnnnnnnnnnnnnnnnnnnnnnnnnnnnnnnnnnnnnnnnnnnnnnnnnnnnnnnnnnnnnnnnnnnnnnnnnnnnnnnnnnnnnnnnnnnnnnnnnnnnnnnnnnnnnnnnnnnnnnnnnnnnnnnnnnnnnnnnnnnnnnnnnnnnnnnnnnnnnnnnnnnnnnnnnnnnnnnnnnnnnnnnnnnnnnnnnnnnnnnnnnnnnnnnnnnnnnnnnnnnnnnnnnnnnnnnnnnnnnnnnnnnnnnnnnnnnnnnnnnnnnnnnnnnnnnnnnnnnnnnnnnnnnnnnnnnnnnnnnnnnnnnnnnnnnnnnnnnnnnnnnnnnnnnnnnnnnnnnnnnnnnnnnnnnnnnnnnnnnnnnnnnnnnnnnnnnnnnnnnnnnnnnnnnnnnnnnnnnnnnnnnnnnnnnnnnnnnnnnnnnnnnnnnnnnnnnnnnnnnnnnnnnnnnnnnnnnnnnnnnnnnnnnnnnnnnnnnnnnnnnnnnnnnnnnnnnnnnnnnnnnnnnnnnnnnnnnnnnnnnnnnnnnnnnnnnnnnnnnnnnnnnnnnnnnnnnnnnnnnnnnnnnnnnnnnnnnnnnnnnnnnnnnnnnnnnnnnnnnnnnnnnnnnnnnnnnnnnnnnnnnnnnnnnnnnnnnnnnnnnnnnnnnnnnnnnnnnnnnnnnnnnnnnnnnnnnnnnnnnnnnnnnnnnnnnnnnnnnnnnnnnnnnnnnnnnnnnnnnnnnnnnnnnnnnnnnnnnnnnnnnnnnnnnnnnnnnnnnnnnnnnnnnnnnnnnnnnnnnnnnnnnnnnnnnnnnnnnnnnnnnnnnnnnnnnnnnnnnnnnnnnnnnnnnnnnnnnnnnnnnnnnnnnnnnnnnnnnnnnnnnnnnnnnnnnnnnnnnnnnnnnnnnnnnnnnnnnnnnnnnnnnnnnnnnnnnnnnnnnnnnnnnnnnnnnnnnnnnnnnnnnnnnnnnnnnnnnnnnnnnnnnnnnnnnnnnnnnnnnnnnnnnnnnnnnnnnnnnnnnnnnnnnnnnnnnnnnnnnnnnnnnnnnnnnnnnnnnnnnnnnnnnnnnnnnnnnnnnnnnnnnnnnnnnnnnnnnnnnnnnnnnnnnnnnnnnnnnnnnnnnnnnnnnnnnnnnnnnnnnnnnnnnnnnnnnnnnnnnnnnnnnnnnnnnnnnnnnnnnnnnnnnnnnnnnnnnnnnnnnnnnnnnnnnnnnnnnnnnnnnnnnnnnnnnnnnnnnnnnnnnnnnnnnnnnnnnnnnnnnnnnnnnnnnnnnnnnnnnnnnnnnnnnnnnnnnnnnnnnnnnnnnnnnnnnnnnnnnnnnnnnnnnnnnnnnnnnnnnnnnnnnnnnnnnnnnnnnnnnnnnnnnnnnnnnnnnnnnnnnnnnnnnnnnnnnnnnnnnnnnnnnnnnnnnnnnnnnnnnnnnnnnnnnnnnnnnnnnnnnnnnnnnnnnnnnnnnnnnnnnnnnnnnnnnnnnnnnnnnnnnnnnnnnnnnnnnnnnnnnnnnnnnnnnnnnnnnnnnnnnnnnnnnnnnnnnnnnnnnnnnnnnnnnnnnnnnnnnnnnnnnnnnnnnnnnnnnnnnnnnnnnnnnnnnnnnnnnnnnnnnnnnnnnnnnnnnnnnnnnnnnnnnnnnnnnnnnnnnnnnnnnnnnnnnnnnnnnnnnnnnnnnnnnnnnnnnnnnnnnnnnnnnnnnnnnnnnnnnnnnnnnnnnnnnnnnnnnnnnnnnnnnnnnnnnnnnnnnnnnnnnnnnnnnnnnnnnnnnnnnnnnnnnnnnnnnnnnnnnnnnnnnnnnnnnnnnnnnnnnnnnnnnnnnnnnnnnnnnnnnnnnnnnnnnnnnnnnnnnnnnnnnnnnnnnnnnnnnnnnnnnnnnnnnnnnnnnnnnnnnnnnnnnnnnnnnnnnnnnnnnnnnnnnnnnnnnnnnnnnnnnnnnnnnnnnnnnnnnnnnnnnnnnnnnnnnnnnnnnnnnnnnnnnnnnnnnnnnnnnnnnnnnnnnnnnnnnnnnnnnnnnnnnnnnnnnnnnnnnnnnnnnnnnnnnnnnnnnnnnnnnnnnnnnnnnnnnnnnnnnnnnnnnnnnnnnnnnnnnnnnnnnnnnnnnnnnnnnnnnnnnnnnnnnnnnnnnnnnnnnnnnnnnnnnnnnnnnnnnnnnnnnnnnnnnnnnnnnnnnnnnnnnnnnnnnnnnnnnnnnnnnnnnnnnnnnnnnnnnnnnnnnnnnnnnnnnnnnnnnnnnnnnnnnnnnnnnnnnnnnnnnnnnnnnnnnnnnnnnnnnnnnnnnnnnnnnnnnnnnnnnnnnnnnnnnnnnnnnnnnnnnnnnnnnnnnnnnnnnnnnnnnnnnnnnnnnnnnnnnnnnnnnnnnnnnnnnnnnnnnnnnnnnnnnnnnnnnnnnnnnnnnnnnnnnnnnnnnnnnnnnnnnnnnnnnnnnnnnnnnnnnnnnnnnnnnnnnnnnnnnnnnnnnnnnnnnnnnnnnnnnnnnnnnnnnnnnnnnnnnnnnnnnnnnnnnnnnnnnnnnnnnnnnnnnnnnnnnnnnnnnnnnnnnnnnnnnnnnnnnnnnnnnnnnnnnnnnnnnnnnnnnnnnnnnnnnnnnnnnnnnnnnnnnnnnnnnnnnnnnnnnnnnnnnnnnnnnnnnnnnnnnnnnnnnnnnnnnnnnnnnnnnnnnnnnnnnnnnnnnnnnnnnnnnnnnnnnnnnnnnnnnnnnnnnnnnnnnnnnnnnnnnnnnnnnnnnnnnnnnnnnnnnnnnnnnnnnnnnnnnnnnnnnnnnnnnnnnnnnnnnnnnnnnnnnnnnnnnnnnnnnnnnnnnnnnnnnnnnnnnnnnnnnnnnnnnnnnnnnnnnnnnnnnnnnnnnnnnnnnnnnnnnnnnnnnnnnnnnnnnnnnnnnnnnnnnnnnnnnnnnnnnnnnnnnnnnnnnnnnnnnnnnnnnnnnnnnnnnnnnnnnnnnnnnnnnnnnnnnnnnnnnnnnnnnnnnnnnnnnnnnnnnnnnnnnnnnnnnnnnnnnnnnnnnnnnnnnnnnnnnnnnnnnnnnnnnnnnnnnnnnnnnnnnnnnnnnnnnnnnnnnnnnnnnnnnnnnnnnnnnnnnnnnnnnnnnnnnnnnnnnnnnnnnnnnnnnnnnnnnnnnnnnnnnnnnnnnnnnnnnnnnnnnnnnnnnnnnnnnnnnnnnnnnnnnnnnnnnnnnnnnnnnnnnnnnnnnnnnnnnnnnnnnnnnnnnnnnnnnnnnnnnnnnnnnnnnnnnnnnnnnnnnnnnnnnnnnnnnnnnnnnnnnnnnnnnnnnnnnnnnnnnnnnnnnnnnnnnnnnnnnnnnnnnnnnnnnnnnnnnnnnnnnnnnnnnnnnnnnnnnnnnnnnnnnnnnnnnnnnnnnnnnnnnnnnnnnnnnnnnnnnnnnnnnnnnnnnnnnnnnnnnnnnnnnnnnnnnnnnnnnnnnnnnnnnnnnnnnnnnnnnnnnnnnnnnnnnnnnnnnnnnnnnnnnnnnnnnnnnnnnnnnnnnnnnnnnnnnnnnnnnnnnnnnnnnnnnnnnnnnnnnnnnnnnnnnnnnnnnnnnnnnnnnnnnnnnnnnnnnnnnnnnnnnnnnnnnnnnnnnnnnnnnnnnnnnnnnnnnnnnnnnnnnnnnnnnnnnnnnnnnnnnnnnnnnnnnnnnnnnnnnnnnnnnnnnnnnnnnnnnnnnnnnnnnnnnnnnnnnnnnnnnnnnnnnnnnnnnnnnnnnnnnnnnnnnnnnnnnnnnnnnnnnnnnnnnnnnnnnnnnnnnnnnnnnnnnnnnnnnnnnnnnnnnnnnnnnnnnnnnnnnnnnnnnnnnnnnnnnnnnnnnnnnnnnnnnnnnnnnnnnnnnnnnnnnnnnnnnnnnnnnnnnnnnnnnnnnnnnnnnnnnnnnnnnnnnnnnnnnnnnnnnnnnnnnnnnnnnnnnnnnnnnnnnnnnnnnnnnnnnnnnnnnnnnnnnnnnnnnnnnnnnnnnnnnnnnnnnnnnnnnnnnnnnnnnnnnnnnnnnnnnnnnnnnnnnnnnnnnnnnnnnnnnnnnnnnnnnnnnnnnnnnnnnnnnnnnnnnnnnnnnnnnnnnnnnnnnnnnnnnnnnnnnnnnnnnnnnnnnnnnnnnnnnnnnnnnnnnnnnnnnnnnnnnnnnnnnnnnnnnnnnnnnnnnnnnnnnnnnnnnnnnnnnnnnnnnnnnnnnnnnnnnnnnnnnnnnnnnnnnnnnnnnnnnnnnnnnnnnnnnnnnnnnnnnnnnnnnnnnnnnnnnnnnnnnnnnnnnnnnnnnnnnnnnnnnnnnnnnnnnnnnnnnnnnnnnnnnnnnnnnnnnnnnnnnnnnnnnnnnnnnnnnnnnnnnnnnnnnnnnnnnnnnnnnnnnnnnnnnnnnnnnnnnnnnnnnnnnnnnnnnnnnnnnnnnnnnnnnnnnnnnnnnnnnnnnnnnnnnnnnnnnnnnnnnnnnnnnnnnnnnnnnnnnnnnnnnnnnnnnnnnnnnnnnnnnnnnnnnnnnnnnnnnnnnnnnnnnnnnnnnnnnnnnnnnnnnnnnnnnnnnnnnnnnnnnnnnnnnnnnnnnnnnnnnnnnnnnnnnnnnnnnnnnnnnnnnnnnnnnnnnnnnnnnnnnnnnnnnnnnnnnnnnnnnnnnnnnnnnnnnnnnnnnnnnnnnnnnnnnnnnnnnnnnnnnnnnnnnnnnnnnnnnnnnnnnnnnnnnnnnnnnnnnnnnnnnnnnnnnnnnnnnnnnnnnnnnnnnnnnnnnnnnnnnnnnnnnnnnnnnnnnnnnnnnnnnnnnnnnnnnnnnnnnnnnnnnnnnnnnnnnnnnnnnnnnnnnnnnnnnnnnnnnnnnnnnnnnnnnnnnnnnnnnnnnnnnnnnnnnnnnnnnnnnnnnnnnnnnnnnnnnnnnnnnnnnnnnnnnnnnnnnnnnnnnnnnnnnnnnnnnnnnnnnnnnnnnnnnnnnnnnnnnnnnnnnnnnnnnnnnnnnnnnnnnnnnnnnnnnnnnnnnnnnnnnnnnnnnnnnnnnnnnnnnnnnnnnnnnnnnnnnnnnnnnnnnnnnnnnnnnnnnnnnnnnnnnnnnnnnnnnnnnnnnnnnnnnnnnnnnnnnnnnnnnnnnnnnnnnnnnnnnnnnnnnnnnnnnnnnnnnnnnnnnnnnnnnnnnnnnnnnnnnnnnnnnnnnnnnnnnnnnnnnnnnnnnnnnnnnnnnnnnnnnnnnnnnnnnnnnnnnnnnnnnnnnnnnnnnnnnnnnnnnnnnnnnnnnnnnnnnnnnnnnnnnnnnnnnnnnnnnnnnnnnnnnnnnnnnnnnnnnnnnnnnnnnnnnnnnnnnnnnnnnnnnnnnnnnnnnnnnnnnnnnnnnnnnnnnnnnnnnnnnnnnnnnnnnnnnnnnnnnnnnnnnnnnnnnnnnnnnnnnnnnnnnnnnnnnnnnnnnnnnnnnnnnnnnnnnnnnnnnnnnnnnnnnnnnnnnnnnnnnnnnnnnnnnnnnnnnnnnnnnnnnnnnnnnnnnnnnnnnnnnnnnnnnnnnnnnnnnnnnnnnnnnnnnnnnnnnnnnnnnnnnnnnnnnnnnnnnnnnnnnnnnnnnnnnnnnnnnnnnnnnnnnnnnnnnnnnnnnnnnnnnnnnnnnnnnnnnnnnnnnnnnnnnnnnnnnnnnnnnnnnnnnnnnnnnnnnnnnnnnnnnnnnnnnnnnnnnnnnnnnnnnnnnnnnnnnnnnnnnnnnnnnnnnnnnnnnnnnnnnnnnnnnnnnnnnnnnnnnnnnnnnnnnnnnnnnnnnnnnnnnnnnnnnnnnnnnnnnnnnnnnnnnnnnnnnnnnnnnnnnnnnnnnnnnnnnnnnnnnnnnnnnnnnnnnnnnnnnnnnnnnnnnnnnnnnnnnnnnnnnnnnnnnnnnnnnnnnnnnnnnnnnnnnnnnnnnnnnnnnnnnnnnnnnnnnnnnnnnnnnnnnnnnnnnnnnnnnnnnnnnnnnnnnnnnnnnnnnnnnnnnnnnnnnnnnnnnnnnnnnnnnnnnnnnnnnnnnnnnnnnnnnnnnnnnnnnnnnnnnnnnnnnnnnnnnnnnnnnnnnnnnnnnnnnnnnnnnnnnnnnnnnnnnnnnnnnnnnnnnnnnnnnnnnnnnnnnnnnnnnnnnnnnnnnnnnnnnnnnnnnnnnnnnnnnnnnnnnnnnnnnnnnnnnnnnnnnnnnnnnnnnnnnnnnnnnnnnnnnnnnnnnnnnnnnnnnnnnnnnnnnnnnnnnnnnnnnnnnnnnnnnnnnnnnnnnnnnnnnnnnnnnnnnnnnnnnnnnnnnnnnnnnnnnnnnnnnnnnnnnnnnnnnnnnnnnnnnnnnnnnnnnnnnnnnnnnnnnnnnnnnnnnnnnnnnnnnnnnnnnnnnnnnnnnnnnnnnnnnnnnnnnnnnnnnnnnnnnnnnnnnnnnnnnnnnnnnnnnnnnnnnnnnnnnnnnnnnnnnnnnnnnnnnnnnnnnnnnnnnnnnnnnnnnnnnnnnnnnnnnnnnnnnnnnnnnnnnnnnnnnnnnnnnnnnnnnnnnnnnnnnnnnnnnnnnnnnnnnnnnnnnnnnnnnnnnnnnnnnnnnnnnnnnnnnnnnnnnnnnnnnnnnnnnnnnnnnnnnnnnnnnnnnnnnnnnnnnnnnnnnnnnnnnnnnnnnnnnnnnnnnnnnnnnnnnnnnnnnnnnnnnnnnnnnnnnnnnnnnnnnnnnnnnnnnnnnnnnnnnnnnnnnnnnnnnnnnnnnnnnnnnnnnnnnnnnnnnnnnnnnnnnnnnnnnnnnnnnnnnnnnnnnnnnnnnnnnnnnnnnnnnnnnnnnnnnnnnnnnnnnnnnnnnnnnnnnnnnnnnnnnnnnnnnnnnnnnnnnnnnnnnnnnnnnnnnnnnnnnnnnnnnnnnnnnnnnnnnnnnnnnnnnnnnnnnnnnnnnnnnnnnnnnnnnnnnnnnnnnnnnnnnnnnnnnnnnnnnnnnnnnnnnnnnnnnnnnnnnnnnnnnnnnnnnnnnnnnnnnnnnnnnnnnnnnnnnnnnnnnnnnnnnnnnnnnnnnnnnnnnnnnnnnnnnnnnnnnnnnnnnnnnnnnnnnnnnnnnnnnnnnnnnnnnnnnnnnnnnnnnnnnnnnnnnnnnnnnnnnnnnnnnnnnnnnnnnnnnnnnnnnnnnnnnnnnnnnnnnnnnnnnnnnnnnnnnnnnnnnnnnnnnnnnnnnnnnnnnnnnnnnnnnnnnnnnnnnnnnnnnnnnnnnnnnnnnnnnnnnnnnnnnnnnnnnnnnnnnnnnnnnnnnnnnnnnnnnnnnnnnnnnnnnnnnnnnnnnnnnnnnnnnnnnnnnnnnnnnnnnnnnnnnnnnnnnnnnnnnnnnnnnnnnnnnnnnnnnnnnnnnnnnnnnnnnnnnnnnnnnnnnnnnnnnnnnnnnnnnnnnnnnnnnnnnnnnnnnnnnnnnnnnnnnnnnnnnnnnnnnnnnnnnnnnnnnnnnnnnnnnnnnnnnnnnnnnnnnnnnnnnnnnnnnnnnnnnnnnnnnnnnnnnnnnnnnnnnnnnnnnnnnnnnnnnnnnnnnnnnnnnnnnnnnnnnnnnnnnnnnnnnnnnnnnnnnnnnnnnnnnnnnnnnnnnnnnnnnnnnnnnnnnnnnnnnnnnnnnnnnnnnnnnnnnnnnnnnnnnnnnnnnnnnnnnnnnnnnnnnnnnnnnnnnnnnnnnnnnnnnnnnnnnnnnnnnnnnnnnnnnnnnnnnnnnnnnnnnnnnnnnnnnnnnnnnnnnnnnnnnnnnnnnnnnnnnnnnnnnnnnnnnnnnnnnnnnnnnnnnnnnnnnnnnnnnnnnnnnnnnnnnnnnnnnnnnnnnnnnnnnnnnnnnnnnnnnnnnnnnnnnnnnnnnnnnnnnnnnnnnnnnnnnnnnnnnnnnnnnnnnnnnnnnnnnnnnnnnnnnnnnnnnnnnnnnnnnnnnnnnnnnnnnnnnnnnnnnnnnnnnnnnnnnnnnnnnnnnnnnnnnnnnnnnnnnnnnnnnnnnnnnnnnnnnnnnnnnnnnnnnnnnnnnnnnnnnnnnnnnnnnnnnnnnnnnnnnnnnnnnnnnnnnnnnnnnnnnnnnnnnnnnnnnnnnnnnnnnnnnnnnnnnnnnnnnnnnnnnnnnnnnnnnnnnnnnnnnnnnnnnnnnnnnnnnnnnnnnnnnnnnnnnnnnnnnnnnnnnnnnnnnnnnnnnnnnnnnnnnnnnnnnnnnnnnnnnnnnnnnnnnnnnnnnnnnnnnnnnnnnnnnnnnnnnnnnnnnnnnnnnnnnnnnnnnnnnnnnnnnnnnnnnnnnnnnnnnnnnnnnnnnnnnnnnnnnnnnnnnnnnnnnnnnnnnnnnnnnnnnnnnnnnnnnnnnnnnnnnnnnnnnnnnnnnnnnnnnnnnnnnnnnnnnnnnnnnnnnnnnnnnnnnnnnnnnnnnnnnnnnnnnnnnnnnnnnnnnnnnnnnnnnnnnnnnnnnnnnnnnnnnnnnnnnnnnnnnnnnnnnnnnnnnnnnnnnnnnnnnnnnnnnnnnnnnnnnnnnnnnnnnnnnnnnnnnnnnnnnnnnnnnnnnnnnnnnnnnnnnnnnnnnnnnnnnnnnnnnnnnnnnnnnnnnnnnnnnnnnnnnnnnnnnnnnnnnnnnnnnnnnnnnnnnnnnnnnnnnnnnnnnnnnnnnnnnnnnnnnnnnnnnnnnnnnnnnnnnnnnnnnnnnnnnnnnnnnnnnnnnnnnnnnnnnnnnnnnnnnnnnnnnnnnnnnnnnnnnnnnnnnnnnnnnnnnnnnnnnnnnnnnnnnnnnnnnnnnnnnnnnnnnnnnnnnnnnnnnnnnnnnnnnnnnnnnnnnnnnnnnnnnnnnnnnnnnnnnnnnnnnnnnnnnnnnnnnnnnnnnnnnnnnnnnnnnnnnnnnnnnnnnnnnnnnnnnnnnnnnnnnnnnnnnnnnnnnnnnnnnnnnnnnnnnnnnnnnnnnnnnnnnnnnnnnnnnnnnnnnnnnnnnnnnnnnnnnnnnnnnnnnnnnnnnnnnnnnnnnnnnnnnnnnnnnnnnnnnnnnnnnnnnnnnnnnnnnnnnnnnnnnnnnnnnnnnnnnnnnnnnnnnnnnnnnnnnnnnnnnnnnnnnnnnnnnnnnnnnnnnnnnnnnnnnnnnnnnnnnnnnnnnnnnnnnnnnnnnnnnnnnnnnnnnnnnnnnnnnnnnnnnnnnnnnnnnnnnnnnnnnnnnnnnnnnnnnnnnnnnnnnnnnnnnnnnnnnnnnnnnnnnnnnnnnnnnnnnnnnnnnnnnnnnnnnnnnnnnnnnnnnnnnnnnnnnnnnnnnnnnnnnnnnnnnnnnnnnnnnnnnnnnnnnnnnnnnnnnnnnnnnnnnnnnnnnnnnnnnnnnnnnnnnnnnnnnnnnnnnnnnnnnnnnnnnnnnnnnnnnnnnnnnnnnnnnnnnnnnnnnnnnnnnnnnnnnnnnnnnnnnnnnnnnnnnnnnnnnnnnnnnnnnnnnnnnnnnnnnnnnnnnnnnnnnnnnnnnnnnnnnnnnnnnnnnnnnnnnnnnnnnnnnnnnnnnnnnnnnnnnnnnnnnnnnnnnnnnnnnnnnnnnnnnnnnnnnnnnnnnnnnnnnnnnnnnnnnnnnnnnnnnnnnnnnnnnnnnnnnnnnnnnnnnnnnnnnnnnnnnnnnnnnnnnnnnnnnnnnnnnnnnnnnnnnnnnnnnnnnnnnnnnnnnnnnnnnnnnnnnnnnnnnnnnnnnnnnnnnnnnnnnnnnnnnnnnnnnnnnnnnnnnnnnnnnnnnnnnnnnnnnnnnnnnnnnnnnnnnnnnnnnnnnnnnnnnnnnnnnnnnnnnnnnnnnnnnnnnnnnnnnnnnnnnnnnnnnnnnnnnnnnnnnnnnnnnnnnnnnnnnnnnnnnnnnnnnnnnnnnnnnnnnnnnnnnnnnnnnnnnnnnnnnnnnnnnnnnnnnnnnnnnnnnnnnnnnnnnnnnnnnnnnnnnnnnnnnnnnnnnnnnnnnnnnnnnnnnnnnnnnnnnnnnnnnnnnnnnnnnnnnnnnnnnnnnnnnnnnnnnnnnnnnnnnnnnnnnnnnnnnnnnnnnnnnnnnnnnnnnnnnnnnnnnnnnnnnnnnnnnnnnnnnnnnnnnnnnnnnnnnnnnnnnnnnnnnnnnnnnnnnnnnnnnnnnnnnnnnnnnnnnnnnnnnnnnnnnnnnnnnnnnnnnnnnnnnnnnnnnnnnnnnnnnnnnnnnnnnnnnnnnnnnnnnnnnnnnnnnnnnnnnnnnnnnnnnnnnnnnnnnnnnnnnnnnnnnnnnnnnnnnnnnnnnnnnnnnnnnnnnnnnnnnnnnnnnnnnnnnnnnnnnnnnnnnnnnnnnnnnnnnnnnnnnnnnnnnnnnnnnnnnnnnnnnnnnnnnnnnnnnnnnnnnnnnnnnnnnnnnnnnnnnnnnnnnnnnnnnnnnnnnnnnnnnnnnnnnnnnnnnnnnnnnnnnnnnnnnnnnnnnnnnnnnnnnnnnnnnnnnnnnnnnnnnnnnnnnnnnnnnnnnnnnnnnnnnnnnnnnnnnnnnnnnnnnnnnnnnnnnnnnnnnnnnnnnnnnnnnnnnnnnnnnnnnnnnnnnnnnnnnnnnnnnnnnnnnnnnnnnnnnnnnnnnnnnnnnnnnnnnnnnnnnnnnnnnnnnnnnnnnnnnnnnnnnnnnnnnnnnnnnnnnnnnnnnnnnnnnnnnnnnnnnnnnnnnnnnnnnnnnnnnnnnnnnnnnnnnnnnnnnnnnnnnnnnnnnnnnnnnnnnnnnnnnnnnnnnnnnnnnnnnnnnnnnnnnnnnnnnnnnnnnnnnnnnnnnnnnnnnnnnnnnnnnnnnnnnnnnnnnnnnnnnnnnnnnnnnnnnnnnnnnnnnnnnnnnnnnnnnnnnnnnnnnnnnnnnnnnnnnnnnnnnnnnnnnnnnnnnnnnnnnnnnnnnnnnnnnnnnnnnnnnnnnnnnnnnnnnnnnnnnnnnnnnnnnnnnnnnnnnnnnnnnnnnnnnnnnnnnnnnnnnnnnnnnnnnnnnnnnnnnnnnnnnnnnnnnnnnnnnnnnnnnnnnnnnnnnnnnnnnnnnnnnnnnnnnnnnnnnnnnnnnnnnnnnnnnnnnnnnnnnnnnnnnnnnnnnnnnnnnnnnnnnnnnnnnnnnnnnnnnnnnnnnnnnnnnnnnnnnnnnnnnnnnnnnnnnnnnnnnnnnnnnnnnnnnnnnnnnnnnnnnnnnnnnnnnnnnnnnnnnnnnnnnnnnnnnnnnnnnnnnnnnnnnnnnnnnnnnnnnnnnnnnnnnnnnnnnnnnnnnnnnnnnnnnnnnnnnnnnnnnnnnnnnnnnnnnnnnnnnnnnnnnnnnnnnnnnnnnnnnnnnnnnnnnnnnnnnnnnnnnnnnnnnnnnnnnnnnnnnnnnnnnnnnnnnnnnnnnnnnnnnnnnnnnnnnnnnnnnnnnnnnnnnnnnnnnnnnnnnnnnnnnnnnnnnnnnnnnnnnnnnnnnnnnnnnnnnnnnnnnnnnnnnnnnnnnnnnnnnnnnnnnnnnnnnnnnnnnnnnnnnnnnnnnnnnnnnnnnnnnnnnnnnnnnnnnnnnnnnnnnnnnnnnnnnnnnnnnnnnnnnnnnnnnnnnnnnnnnnnnnnnnnnnnnnnnnnnnnnnnnnnnnnnnnnnnnnnnnnnnnnnnnnnnnnnnnnnnnnnnnnnnnnnnnnnnnnnnnnnnnnnnnnnnnnnnnnnnnnnnnnnnnnnnnnnnnnnnnnnnnnnnnnnnnnnnnnnnnnnnnnnnnnnnnnnnnnnnnnnnnnnnnnnnnnnnnnnnnnnnnnnnnnnnnnnnnnnnnnnnnnnnnnnnnnnnnnnnnnnnnnnnnnnnnnnnnnnnnnnnnnnnnnnnnnnnnnnnnnnnnnnnnnnnnnnnnnnnnnnnnnnnnnnnnnnnnnnnnnnnnnnnnnnnnnnnnnnnnnnnnnnnnnnnnnnnnnnnnnnnnnnnnnnnnnnnnnnnnnnnnnnnnnnnnnnnnnnnnnnnnnnnnnnnnnnnnnnnnnnnnnnnnnnnnnnnnnnnnnnnnnnnnnnnnnnnnnnnnnnnnnnnnnnnnnnnnnnnnnnnnnnnnnnnnnnnnnnnnnnnnnnnnnnnnnnnnnnnnnnnnnnnnnnnnnnnnnnnnnnnnnnnnnnnnnnnnnnnnnnnnnnnnnnnnnnnnnnnnnnnnnnnnnnnnnnnnnnnnnnnnnnnnnnnnnnnnnnnnnnnnnnnnnnnnnnnnnnnnnnnnnnnnnnnnnnnnnnnnnnnnnnnnnnnnnnnnnnnnnnnnnnnnnnnnnnnnnnnnnnnnnnnnnnnnnnnnnnnnnnnnnnnnnnnnnnnnnnnnnnnnnnnnnnnnnnnnnnnnnnnnnnnnnnnnnnnnnnnnnnnnnnnnnnnnnnnnnnnnnnnnnnnnnnnnnnnnnnnnnnnnnnnnnnnnnnnnnnnnnnnnnnnnnnnnnnnnnnnnnnnnnnnnnnnnnnnnnnnnnnnnnnnnnnnnnnnnnnnnnnnnnnnnnnnnnnnnnnnnnnnnnnnnnnnnnnnnnnnnnnnnnnnnnnnnnnnnnnnnnnnnnnnnnnnnnnnnnnnnnnnnnnnnnnnnnnnnnnnnnnnnnnnnnnnnnnnnnnnnnnnnnnnnnnnnnnnnnnnnnnnnnnnnnnnnnnnnnnnnnnnnnnnnnnnnnnnnnnnnnnnnnnnnnnnnnnnnnnnnnnnnnnnnnnnnnnnnnnnnnnnnnnnnnnnnnnnnnnnnnnnnnnnnnnnnnnnnnnnnnnnnnnnnnnnnnnnnnnnnnnnnnnnnnnnnnnnnnnnnnnnnnnnnnnnnnnnnnnnnnnnnnnnnnnnnnnnnnnnnnnnnnnnnnnnnnnnnnnnnnnnnnnnnnnnnnnnnnnnnnnnnnnnnnnnnnnnnnnnnnnnnnnnnnnnnnnnnnnnnnnnnnnnnnnnnnnnnnnnnnnnnnnnnnnnnnnnnnnnnnnnnnnnnnnnnnnnnnnnnnnnnnnnnnnnnnnnnnnnnnnnnnnnnnnnnnnnnnnnnnnnnnnnnnnnnnnnnnnnnnnnnnnnnnnnnnnnnnnnnnnnnnnnnnnnnnnnnnnnnnnnnnnnnnnnnnnnnnnnnnnnnnnnnnnnnnnnnnnnnnnnnnnnnnnnnnnnnnnnnnnnnnnnnnnnnnnnnnnnnnnnnnnnnnnnnnnnnnnnnnnnnnnnnnnnnnnnnnnnnnnnnnnnnnnnnnnnnnnnnnnnnnnnnnnnnnnnnnnnnnnnnnnnnnnnnnnnnnnnnnnnnnnnnnnnnnnnnnnnnnnnnnnnnnnnnnnnnnnnnnnnnnnnnnnnnnnnnnnnnnnnnnnnnnnnnnnnnnnnnnnnnnnnnnnnnnnnnnnnnnnnnnnnnnnnnnnnnnnnnnnnnnnnnnnnnnnnnnnnnnnnnnnnnnnnnnnnnnnnnnnnnnnnnnnnnnnnnnnnnnnnnnnnnnnnnnnnnnnnnnnnnnnnnnnnnnnnnnnnnnnnnnnnnnnnnnnnnnnnnnnnnnnnnnnnnnnnnnnnnnnnnnnnnnnnnnnnnnnnnnnnnnnnnnnnnnnnnnnnnnnnnnnnnnnnnnnnnnnnnnnnnnnnnnnnnnnnnnnnnnnnnnnnnnnnnnnnnnnnnnnnnnnnnnnnnnnnnnnnnnnnnnnnnnnnnnnnnnnnnnnnnnnnnnnnnnnnnnnnnnnnnnnnnnnnnnnnnnnnnnnnnnnnnnnnnnnnnnnnnnnnnnnnnnnnnnnnnnnnnnnnnnnnnnnnnnnnnnnnnnnnnnnnnnnnnnnnnnnnnnnnnnnnnnnnnnnnnnnnnnnnnnnnnnnnnnnnnnnnnnnnnnnnnnnnnnnnnnnnnnnnnnnnnnnnnnnnnnnnnnnnnnnnnnnnnnnnnnnnnnnnnnnnnnnnnnnnnnnnnnnnnnnnnnnnnnnnnnnnnnnnnnnnnnnnnnnnnnnnnnnnnnnnnnnnnnnnnnnnnnnnnnnnnnnnnnnnnnnnnnnnnnnnnnnnnnnnnnnnnnnnnnnnnnnnnnnnnnnnnnnnnnnnnnnnnnnnnnnnnnnnnnnnnnnnnnnnnnnnnnnnnnnnnnnnnnnnnnnnnnnnnnnnnnnnnnnnnnnnnnnnnnnnnnnnnnnnnnnnnnnnnnnnnnnnnnnnnnnnnnnnnnnnnnnnnnnnnnnnnnnnnnnnnnnnnnnnnnnnnnnnnnnnnnnnnnnnnnnnnnnnnnnnnnnnnnnnnnnnnnnnnnnnnnnnnnnnnnnnnnnnnnnnnnnnnnnnnnnnnnnnnnnnnnnnnnnnnnnnnnnnnnnnnnnnnnnnnnnnnnnnnnnnnnnnnnnnnnnnnnnnnnnnnnnnnnnnnnnnnnnnnnnnnnnnnnnnnnnnnnnnnnnnnnnnnnnnnnnnnnnnnnnnnnnnnnnnnnnnnnnnnnnnnnnnnnnnnnnnnnnnnnnnnnnnnnnnnnnnnnnnnnnnnnnnnnnnnnnnnnnnnnnnnnnnnnnnnnnnnnnnnnnnnnnnnnnnnnnnnnnnnnnnnnnnnnnnnnnnnnnnnnnnnnnnnnnnnnnnnnnnnnnnnnnnnnnnnnnnnnnnnnnnnnnnnnnnnnnnnnnnnnnnnnnnnnnnnnnnnnnnnnnnnnnnnnnnnnnnnnnnnnnnnnnnnnnnnnnnnnnnnnnnnnnnnnnnnnnnnnnnnnnnnnnnnnnnnnnnnnnnnnnnnnnnnnnnnnnnnnnnnnnnnnnnnnnnnnnnnnnnnnnnnnnnnnnnnnnnnnnnnnnnnnnnnnnnnnnnnnnnnnnnnnnnnnnnnnnnnnnnnnnnnnnnnnnnnnnnnnnnnnnnnnnnnnnnnnnnnnnnnnnnnnnnnnnnnnnnnnnnnnnnnnnnnnnnnnnnnnnnnnnnnnnnnnnnnnnnnnnnnnnnnnnnnnnnnnnnnnnnnnnnnnnnnnnnnnnnnnnnnnnnnnnnnnnnnnnnnnnnnnnnnnnnnnnnnnnnnnnnnnnnnnnnnnnnnnnnnnnnnnnnnnnnnnnnnnnnnnnnnnnnnnnnnnnnnnnnnnnnnnnnnnnnnnnnnnnnnnnnnnnnnnnnnnnnnnnnnnnnnnnnnnnnnnnnnnnnnnnnnnnnnnnnnnnnnnnnnnnnnnnnnnnnnnnnnnnnnnnnnnnnnnnnnnnnnnnnnnnnnnnnnnnnnnnnnnnnnnnnnnnnnnnnnnnnnnnnnnnnnnnnnnnnnnnnnnnnnnnnnnnnnnnnnnnnnnnnnnnnnnnnnnnnnnnnnnnnnnnnnnnnnnnnnnnnnnnnnnnnnnnnnnnnnnnnnnnnnnnnnnnnnnnnnnnnnnnnnnnnnnnnnnnnnnnnnnnnnnnnnnnnnnnnnnnnnnnnnnnnnnnnnnnnnnnnnnnnnnnnnnnnnnnnnnnnnnnnnnnnnnnnnnnnnnnnnnnnnnnnnnnnnnnnnnnnnnnnnnnnnnnnnnnnnnnnnnnnnnnnnnnnnnnnnnnnnnnnnnnnnnnnnnnnnnnnnnnnnnnnnnnnnnnnnnnnnnnnnnnnnnnnnnnnnnnnnnnnnnnnnnnnnnnnnnnnnnnnnnnnnnnnnnnnnnnnnnnnnnnnnnnnnnnnnnnnnnnnnnnnnnnnnnnnnnnnnnnnnnnnnnnnnnnnnnnnnnnnnnnnnnnnnnnnnnnnnnnnnnnnnnnnnnnnnnnnnnnnnnnnnnnnnnnnnnnnnnnnnnnnnnnnnnnnnnnnnnnnnnnnnnnnnnnnnnnnnnnnnnnnnnnnnnnnnnnnnnnnnnnnnnnnnnnnnnnnnnnnnnnnnnnnnnnnnnnnnnnnnnnnnnnnnnnnnnnnnnnnnnnnnnnnnnnnnnnnnnnnnnnnnnnnnnnnnnnnnnnnnnnnnnnnnnnnnnnnnnnnnnnnnnnnnnnnnnnnnnnnnnnnnnnnnnnnnnnnnnnnnnnnnnnnnnnnnnnnnnnnnnnnnnnnnnnnnnnnnnnnnnnnnnnnnnnnnnnnnnnnnnnnnnnnnnnnnnnnnnnnnnnnnnnnnnnnnnnnnnnnnnnnnnnnnnnnnnnnnnnnnnnnnnnnnnnnnnnnnnnnnnnnnnnnnnnnnnnnnnnnnnnnnnnnnnnnnnnnnnnnnnnnnnnnnnnnnnnnnnnnnnnnnnnnnnnnnnnnnnnnnnnnnnnnnnnnnnnnnnnnnnnnnnnnnnnnnnnnnnnnnnnnnnnnnnnnnnnnnnnnnnnnnnnnnnnnnnnnnnnnnnnnnnnnnnnnnnnnnnnnnnnnnnnnnnnnnnnnnnnnnnnnnnnnnnnnnnnnnnnnnnnnnnnnnnnnnnnnnnnnnnnnnnnnnnnnnnnnnnnnnnnnnnnnnnnnnnnnnnnnnnnnnnnnnnnnnnnnnnnnnnnnnnnnnnnnnnnnnnnnnnnnnnnnnnnnnnnnnnnnnnnnnnnnnnnnnnnnnnnnnnnnnnnnnnnnnnnnnnnnnnnnnnnnnnnnnnnnnnnnnnnnnnnnnnnnnnnnnnnnnnnnnnnnnnnnnnnnnnnnnnnnnnnnnnnnnnnnnnnnnnnnnnnnnnnnnnnnnnnnnnnnnnnnnnnnnnnnnnnnnnnnnnnnnnnnnnnnnnnnnnnnnnnnnnnnnnnnnnnnnnnnnnnnnnnnnnnnnnnnnnnnnnnnnnnnnnnnnnnnnnnnnnnnnnnnnnnnnnnnnnnnnnnnnnnnnnnnnnnnnnnnnnnnnnnnnnnnnnnnnnnnnnnnnnnnnnnnnnnnnnnnnnnnnnnnnnnnnnnnnnnnnnnnnnnnnnnnnnnnnnnnnnnnnnnnnnnnnnnnnnnnnnnnnnnnnnnnnnnnnnnnnnnnnnnnnnnnnnnnnnnnnnnnnnnnnnnnnnnnnnnnnnnnnnnnnnnnnnnnnnnnnnnnnnnnnnnnnnnnnnnnnnnnnnnnnnnnnnnnnnnnnnnnnnnnnnnnnnnnnnnnnnnnnnnnnnnnnnnnnnnnnnnnnnnnnnnnnnnnnnnnnnnnnnnnnnnnnnnnnnnnnnnnnnnnnnnnnnnnnnnnnnnnnnnnnnnnnnnnnnnnnnnnnnnnnnnnnnnnnnnnnnnnnnnnnnnnnnnnnnnnnnnnnnnnnnnnnnnnnnnnnnnnnnnnnnnnnnnnnnnnnnnnnnnnnnnnnnnnnnnnnnnnnnnnnnnnnnnnnnnnnnnnnnnnnnnnnnnnnnnnnnnnnnnnnnnnnnnnnnnnnnnnnnnnnnnnnnnnnnnnnnnnnnnnnnnnnnnnnnnnnnnnnnnnnnnnnnnnnnnnnnnnnnnnnnnnnnnnnnnnnnnnnnnnnnnnnnnnnnnnnnnnnnnnnnnnnnnnnnnnnnnnnnnnnnnnnnnnnnnnnnnnnnnnnnnnnnnnnnnnnnnnnnnnnnnnnnnnnnnnnnnnnnnnnnnnnnnnnnnnnnnnnnnnnnnnnnnnnnnnnnnnnnnnnnnnnnnnnnnnnnnnnnnnnnnnnnnnnnnnnnnnnnnnnnnnnnnnnnnnnnnnnnnnnnnnnnnnnnnnnnnnnnnnnnnnnnnnnnnnnnnnnnnnnnnnnnnnnnnnnnnnnnnnnnnnnnnnnnnnnnnnnnnnnnnnnnnnnnnnnnnnnnnnnnnnnnnnnnnnnnnnnnnnnnnnnnnnnnnnnnnnnnnnnnnnnnnnnnnnnnnnnnnnnnnnnnnnnnnnnnnnnnnnnnnnnnnnnnnnnnnnnnnnnnnnnnnnnnnnnnnnnnnnnnnnnnnnnnnnnnnnnnnnnnnnnnnnnnnnnnnnnnnnnnnnnnnnnnnnnnnnnnnnnnnnnnnnnnnnnnnnnnnnnnnnnnnnnnnnnnnnnnnnnnnnnnnnnnnnnnnnnnnnnnnnnnnnnnnnnnnnnnnnnnnnnnnnnnnnnnnnnnnnnnnnnnnnnnnnnnnnnnnnnnnnnnnnnnnnnnnnnnnnnnnnnnnnnnnnnnnnnnnnnnnnnnnnnnnnnnnnnnnnnnnnnnnnnnnnnnnnnnnnnnnnnnnnnnnnnnnnnnnnnnnnnnnnnnnnnnnnnnnnnnnnnnnnnnnnnnnnnnnnnnnnnnnnnnnnnnnnnnnnnnnnnnnnnnnnnnnnnnnnnnnnnnnnnnnnnnnnnnnnnnnnnnnnnnnnnnnnnnnnnnnnnnnnnnnnnnnnnnnnnnnnnnnnnnnnnnnnnnnnnnnnnnnnnnnnnnnnnnnnnnnnnnnnnnnnnnnnnnnnnnnnnnnnnnnnnnnnnnnnnnnnnnnnnnnnnnnnnnnnnnnnnnnnnnnnnnnnnnnnnnnnnnnnnnnnnnnnnnnnnnnnnnnnnnnnnnnnnnnnnnnnnnnnnnnnnnnnnnnnnnnnnnnnnnnnnnnnnnnnnnnnnnnnnnnnnnnnnnnnnnnnnnnnnnnnnnnnnnnnnnnnnnnnnnnnnnnnnnnnnnnnnnnnnnnnnnnnnnnnnnnnnnnnnnnnnnnnnnnnnnnnnnnnnnnnnnnnnnnnnnnnnnnnnnnnnnnnnnnnnnnnnnnnnnnnnnnnnnnnnnnnnnnnnnnnnnnnnnnnnnnnnnnnnnnnnnnnnnnnnnnnnnnnnnnnnnnnnnnnnnnnnnnnnnnnnnnnnnnnnnnnnnnnnnnnnnnnnnnnnnnnnnnnnnnnnnnnnnnnnnnnnnnnnnnnnnnnnnnnnnnnnnnnnnnnnnnnnnnnnnnnnnnnnnnnnnnnnnnnnnnnnnnnnnnnnnnnnnnnnnnnnnnnnnnnnnnnnnnnnnnnnnnnnnnnnnnnnnnnnnnnnnnnnnnnnnnnnnnnnnnnnnnnnnnnnnnnnnnnnnnnnnnnnnnnnnnnnnnnnnnnnnnnnnnnnnnnnnnnnnnnnnnnnnnnnnnnnnnnnnnnnnnnnnnnnnnnnnnnnnnnnnnnnnnnnnnnnnnnnnnnnnnnnnnnnnnnnnnnnnnnnnnnnnnnnnnnnnnnnnnnnnnnnnnnnnnnnnnnnnnnnnnnnnnnnnnnnnnnnnnnnnnnnnnnnnnnnnnnnnnnnnnnnnnnnnnnnnnnnnnnnnnnnnnnnnnnnnnnnnnnnnnnnnnnnnnnnnnnnnnnnnnnnnnnnnnnnnnnnnnnnnnnnnnnnnnnnnnnnnnnnnnnnnnnnnnnnnnnnnnnnnnnnnnnnnnnnnnnnnnnnnnnnnnnnnnnnnnnnnnnnnnnnnnnnnnnnnnnnnnnnnnnnnnnnnnnnnnnnnnnnnnnnnnnnnnnnnnnnnnnnnnnnnnnnnnnnnnnnnnnnnnnnnnnnnnnnnnnnnnnnnnnnnnnnnnnnnnnnnnnnnnnnnnnnnnnnnnnnnnnnnnnnnnnnnnnnnnnnnnnnnnnnnnnnnnnnnnnnnnnnnnnnnnnnnnnnnnnnnnnnnnnnnnnnnnnnnnnnnnnnnnnnnnnnnnnnnnnnnnnnnnnnnnnnnnnnnnnnnnnnnnnnnnnnnnnnnnnnnnnnnnnnnnnnnnnnnnnnnnnnnnnnnnnnnnnnnnnnnnnnnnnnnnnnnnnnnnnnnnnnnnnnnnnnnnnnnnnnnnnnnnnnnnnnnnnnnnnnnnnnnnnnnnnnnnnnnnnnnnnnnnnnnnnnnnnnnnnnnnnnnnnnnnnnnnnnnnnnnnnnnnnnnnnnnnnnnnnnnnnnnnnnnnnnnnnnnnnnnnnnnnnnnnnnnnnnnnnnnnnnnnnnnnnnnnnnnnnnnnnnnnnnnnnnnnnnnnnnnnnnnnnnnnnnnnnnnnnnnnnnnnnnnnnnnnnnnnnnnnnnnnnnnnnnnnnnnnnnnnnnnnnnnnnnnnnnnnnnnnnnnnnnnnnnnnnnnnnnnnnnnnnnnnnnnnnnnnnnnnnnnnnnnnnnnnnnnnnnnnnnnnnnnnnnnnnnnnnnnnnnnnnnnnnnnnnnnnnnnnnnnnnnnnnnnnnnnnnnnnnnnnnnnnnnnnnnnnnnnnnnnnnnnnnnnnnnnnnnnnnnnnnnnnnnnnnnnnnnnnnnnnnnnnnnnnnnnnnnnnnnnnnnnnnnnnnnnnnnnnnnnnnnnnnnnnnnnnnnnnnnnnnnnnnnnnnnnnnnnnnnnnnnnnnnnnnnnnnnnnnnnnnnnnnnnnnnnnnnnnnnnnnnnnnnnnnnnnnnnnnnnnnnnnnnnnnnnnnnnnnnnnnnnnnnnnnnnnnnnnnnnnnnnnnnnnnnnnnnnnnnnnnnnnnnnnnnnnnnnnnnnnnnnnnnnnnnnnnnnnnnnnnnnnnnnnnnnnnnnnnnnnnnnnnnnnnnnnnnnnnnnnnnnnnnnnnnnnnnnnnnnnnnnnnnnnnnnnnnnnnnnnnnnnnnnnnnnnnnnnnnnnnnnnnnnnnnnnnnnnnnnnnnnnnnnnnnnnnnnnnnnnnnnnnnnnnnnnnnnnnnnnnnnnnnnnnnnnnnnnnnnnnnnnnnnnnnnnnnnnnnnnnnnnnnnnnnnnnnnnnnnnnnnnnnnnnnnnnnnnnnnnnnnnnnnnnnnnnnnnnnnnnnnnnnnnnnnnnnnnnnnnnnnnnnnnnnnnnnnnnnnnnnnnnnnnnnnnnnnnnnnnnnnnnnnnnnnnnnnnnnnnnnnnnnnnnnnnnnnnnnnnnnnnnnnnnnnnnnnnnnnnnnnnnnnnnnnnnnnnnnnnnnnnnnnnnnnnnnnnnnnnnnnnnnnnnnnnnnnnnnnnnnnnnnnnnnnnnnnnnnnnnnnnnnnnnnnnnnnnnnnnnnnnnnnnnnnnnnnnnnnnnnnnnnnnnnnnnnnnnnnnnnnnnnnnnnnnnnnnnnnnnnnnnnnnnnnnnnnnnnnnnnnnnnnnnnnnnnnnnnnnnnnnnnnnnnnnnnnnnnnnnnnnnnnnnnnnnnnnnnnnnnnnnnnnnnnnnnnnnnnnnnnnnnnnnnnnnnnnnnnnnnnnnnnnnnnnnnnnnnnnnnnnnnnnnnnnnnnnnnnnnnnnnnnnnnnnnnnnnnnnnnnnnnnnnnnnnnnnnnnnnnnnnnnnnnnnnnnnnnnnnnnnnnnnnnnnnnnnnnnnnnnnnnnnnnnnnnnnnnnnnnnnnnnnnnnnnnnnnnnnnnnnnnnnnnnnnnnnnnnnnnnnnnnnnnnnnnnnnnnnnnnnnnnnnnnnnnnnnnnnnnnnnnnnnnnnnnnnnnnnnnnnnnnnnnnnnnnnnnnnnnnnnnnnnnnnnnnnnnnnnnnnnnnnnnnnnnnnnnnnnnnnnnnnnnnnnnnnnnnnnnnnnnnnnnnnnnnnnnnnnnnnnnnnnnnnnnnnnnnnnnnnnnnnnnnnnnnnnnnnnnnnnnnnnnnnnnnnnnnnnnnnnnnnnnnnnnnnnnnnnnnnnnnnnnnnnnnnnnnnnnnnnnnnnnnnnnnnnnnnnnnnnnnnnnnnnnnnnnnnnnnnnnnnnnnnnnnnnnnnnnnnnnnnnnnnnnnnnnnnnnnnnnnnnnnnnnnnnnnnnnnnnnnnnnnnnnnnnnnnnnnnnnnnnnnnnnnnnnnnnnnnnnnnnnnnnnnnnnnnnnnnnnnnnnnnnnnnnnnnnnnnnnnnnnnnnnnnnnnnnnnnnnnnnnnnnnnnnnnnnnnnnnnnnnnnnnnnnnnnnnnnnnnnnnnnnnnnnnnnnnnnnnnnnnnnnnnnnnnnnnnnnnnnnnnnnnnnnnnnnnnnnnnnnnnnnnnnnnnnnnnnnnnnnnnnnnnnnnnnnnnnnnnnnnnnnnnnnnnnnnnnnnnnnnnnnnnnnnnnnnnnnnnnnnnnnnnnnnnnnnnnnnnnnnnnnnnnnnnnnnnnnnnnnnnnnnnnnnnnnnnnnnnnnnnnnnnnnnnnnnnnnnnnnnnnnnnnnnnnnnnnnnnnnnnnnnnnnnnnnnnnnnnnnnnnnnnnnnnnnnnnnnnnnnnnnnnnnnnnnnnnnnnnnnnnnnnnnnnnnnnnnnnnnnnnnnnnnnnnnnnnnnnnnnnnnnnnnnnnnnnnnnnnnnnnnnnnnnnnnnnnnnnnnnnnnnnnnnnnnnnnnnnnnnnnnnnnnnnnnnnnnnnnnnnnnnnnnnnnnnnnnnnnnnnnnnnnnnnnnnnnnnnnnnnnnnnnnnnnnnnnnnnnnnnnnnnnnnnnnnnnnnnnnnnnnnnnnnnnnnnnnnnnnnnnnnnnnnnnnnnnnnnnnnnnnnnnnnnnnnnnnnnnnnnnnnnnnnnnnnnnnnnnnnnnnnnnnnnnnnnnnnnnnnnnnnnnnnnnnnnnnnnnnnnnnnnnnnnnnnnnnnnnnnnnnnnnnnnnnnnnnnnnnnnnnnnnnnnnnnnnnnnnnnnnnnnnnnnnnnnnnnnnnnnnnnnnnnnnnnnnnnnnnnnnnnnnnnnnnnnnnnnnnnnnnnnnnnnnnnnnnnnnnnnnnnnnnnnnnnnnnnnnnnnnnnnnnnnnnnnnnnnnnnnnnnnnnnnnnnnnnnnnnnnnnnnnnnnnnnnnnnnnnnnnnnnnnnnnnnnnnnnnnnnnnnnnnnnnnnnnnnnnnnnnnnnnnnnnnnnnnnnnnnnnnnnnnnnnnnnnnnnnnnnnnnnnnnnnnnnnnnnnnnnnnnnnnnnnnnnnnnnnnnnnnnnnnnnnnnnnnnnnnnnnnnnnnnnnnnnnnnnnnnnnnnnnnnnnnnnnnnnnnnnnnnnnnnnnnnnnnnnnnnnnnnnnnnnnnnnnnnnnnnnnnnnnnnnnnnnnnnnnnnnnnnnnnnnnnnnnnnnnnnnnnnnnnnnnnnnnnnnnnnnnnnnnnnnnnnnnnnnnnnnnnnnnnnnnnnnnnnnnnnnnnnnnnnnnnnnnnnnnnnnnnnnnnnnnnnnnnnnnnnnnnnnnnnnnnnnnnnnnnnnnnnnnnnnnnnnnnnnnnnnnnnnnnnnnnnnnnnnnnnnnnnnnnnnnnnnnnnnnnnnnnnnnnnnnnnnnnnnnnnnnnnnnnnnnnnnnnnnnnnnnnnnnnnnnnnnnnnnnnnnnnnnnnnnnnnnnnnnnnnnnnnnnnnnnnnnnnnnnnnnnnnnnnnnnnnnnnnnnnnnnnnnnnnnnnnnnnnnnnnnnnnnnnnnnnnnnnnnnnnnnnnnnnnnnnnnnnnnnnnnnnnnnnnnnnnnnnnnnnnnnnnnnnnnnnnnnnnnnnnnnnnnnnnnnnnnnnnnnnnnnnnnnnnnnnnnnnnnnnnnnnnnnnnnnnnnnnnnnnnnnnnnnnnnnnnnnnnnnnnnnnnnnnnnnnnnnnnnnnnnnnnnnnnnnnnnnnnnnnnnnnnnnnnnnnnnnnnnnnnnnnnnnnnnnnnnnnnnnnnnnnnnnnnnnnnnnnnnnnnnnnnnnnnnnnnnnnnnnnnnnnnnnnnnnnnnnnnnnnnnnnnnnnnnnnnnnnnnnnnnnnnnnnnnnnnnnnnnnnnnnnnnnnnnnnnnnnnnnnnnnnnnnnnnnnnnnnnnnnnnnnnnnnnnnnnnnnnnnnnnnnnnnnnnnnnnnnnnnnnnnnnnnnnnnnnnnnnnnnnnnnnnnnnnnnnnnnnnnnnnnnnnnnnnnnnnnnnnnnnnnnnnnnnnnnnnnnnnnnnnnnnnnnnnnnnnnnnnnnnnnnnnnnnnnnnnnnnnnnnnnnnnnnnnnnnnnnnnnnnnnnnnnnnnnnnnnnnnnnnnnnnnnnnnnnnnnnnnnnnnnnnnnnnnnnnnnnnnnnnnnnnnnnnnnnnnnnnnnnnnnnnnnnnnnnnnnnnnnnnnnnnnnnnnnnnnnnnnnnnnnnnnnnnnnnnnnnnnnnnnnnnnnnnnnnnnnnnnnnnnnnnnnnnnnnnnnnnnnnnnnnnnnnnnnnnnnnnnnnnnnnnnnnnnnnnnnnnnnnnnnnnnnnnnnnnnnnnnnnnnnnnnnnnnnnnnnnnnnnnnnnnnnnnnnnnnnnnnnnnnnnnnnnnnnnnnnnnnnnnnnnnnnnnnnnnnnnnnnnnnnnnnnnnnnnnnnnnnnnnnnnnnnnnnnnnnnnnnnnnnnnnnnnnnnnnnnnnnnnnnnnnnnnnnnnnnnnnnnnnnnnnnnnnnnnnnnnnnnnnnnnnnnnnnnnnnnnnnnnnnnnnnnnnnnnnnnnnnnnnnnnnnnnnnnnnnnnnnnnnnnnnnnnnnnnnnnnnnnnnnnnnnnnnnnnnnnnnnnnnnnnnnnnnnnnnnnnnnnnnnnnnnnnnnnnnnnnnnnnnnnnnnnnnnnnnnnnnnnnnnnnnnnnnnnnnnnnnnnnnnnnnnnnnnnnnnnnnnnnnnnnnnnnnnnnnnnnnnnnnnnnnnnnnnnnnnnnnnnnnnnnnnnnnnnnnnnnnnnnnnnnnnnnnnnnnnnnnnnnnnnnnnnnnnnnnnnnnnnnnnnnnnnnnnnnnnnnnnnnnnnnnnnnnnnnnnnnnnnnnnnnnnnnnnnnnnnnnnnnnnnnnnnnnnnnnnnnnnnnnnnnnnnnnnnnnnnnnnnnnnnnnnnnnnnnnnnnnnnnnnnnnnnnnnnnnnnnnnnnnnnnnnnnnnnnnnnnnnnnnnnnnnnnnnnnnnnnnnnnnnnnnnnnnnnnnnnnnnnnnnnnnnnnnnnnnnnnnnnnnnnnnnnnnnnnnnnnnnnnnnnnnnnnnnnnnnnnnnnnnnnnnnnnnnnnnnnnnnnnnnnnnnnnnnnnnnnnnnnnnnnnnnnnnnnnnnnnnnnnnnnnnnnnnnnnnnnnnnnnnnnnnnnnnnnnnnnnnnnnnnnnnnnnnnnnnnnnnnnnnnnnnnnnnnnnnnnnnnnnnnnnnnnnnnnnnnnnnnnnnnnnnnnnnnnnnnnnnnnnnnnnnnnnnnnnnnnnnnnnnnnnnnnnnnnnnnnnnnnnnnnnnnnnnnnnnnnnnnnnnnnnnnnnnnnnnnnnnnnnnnnnnnnnnnnnnnnnnnnnnnnnnnnnnnnnnnnnnnnnnnnnnnnnnnnnnnnnnnnnnnnnnnnnnnnnnnnnnnnnnnnnnnnnnnnnnnnnnnnnnnnnnnnnnnnnnnnnnnnnnnnnnnnnnnnnnnnnnnnnnnnnnnnnnnnnnnnnnnnnnnnnnnnnnnnnnnnnnnnnnnnnnnnnnnnnnnnnnnnnnnnnnnnnnnnnnnnnnnnnnnnnnnnnnnnnnnnnnnnnnnnnnnnnnnnnnnnnnnnnnnnnnnnnnnnnnnnnnnnnnnnnnnnnnnnnnnnnnnnnnnnnnnnnnnnnnnnnnnnnnnnnnnnnnnnnnnnnnnnnnnnnnnnnnnnnnnnnnnnnnnnnnnnnnnnnnnnnnnnnnnnnnnnnnnnnnnnnnnnnnnnnnnnnnnnnnnnnnnnnnnnnnnnnnnnnnnnnnnnnnnnnnnnnnnnnnnnnnnnnnnnnnnnnnnnnnnnnnnnnnnnnnnnnnnnnnnnnnnnnnnnnnnnnnnnnnnnnnnnnnnnnnnnnnnnnnnnnnnnnnnnnnnnnnnnnnnnnnnnnnnnnnnnnnnnnnnnnnnnnnnnnnnnnnnnnnnnnnnnnnnnnnnnnnnnnnnnnnnnnnnnnnnnnnnnnnnnnnnnnnnnnnnnnnnnnnnnnnnnnnnnnnnnnnnnnnnnnnnnnnnnnnnnnnnnnnnnnnnnnnnnnnnnnnnnnnnnnnnnnnnnnnnnnnnnnnnnnnnnnnnnnnnnnnnnnnnnnnnnnnnnnnnnnnnnnnnnnnnnnnnnnnnnnnnnnnnnnnnnnnnnnnnnnnnnnnnnnnnnnnnnnnnnnnnnnnnnnnnnnnnnnnnnnnnnnnnnnnnnnnnnnnnnnnnnnnnnnnnnnnnnnnnnnnnnnnnnnnnnnnnnnnnnnnnnnnnnnnnnnnnnnnnnnnnnnnnnnnnnnnnnnnnnnnnnnnnnnnnnnnnnnnnnnnnnnnnnnnnnnnnnnnnnnnnnnnnnnnnnnnnnnnnnnnnnnnnnnnnnnnnnnnnnnnnnnnnnnnnnnnnnnnnnnnnnnnnnnnnnnnnnnnnnnnnnnnnnnnnnnnnnnnnnnnnnnnnnnnnnnnnnnnnnnnnnnnnnnnnnnnnnnnnnnnnnnnnnnnnnnnnnnnnnnnnnnnnnnnnnnnnnnnnnnnnnnnnnnnnnnnnnnnnnnnnnnnnnnnnnnnnnnnnnnnnnnnnnnnnnnnnnnnnnnnnnnnnnnnnnnnnnnnnnnnnnnnnnnnnnnnnnnnnnnnnnnnnnnnnnnnnnnnnnnnnnnnnnnnnnnnnnnnnnnnnnnnnnnnnnnnnnnnnnnnnnnnnnnnnnnnnnnnnnnnnnnnnnnnnnnnnnnnnnnnnnnnnnnnnnnnnnnnnnnnnnnnnnnnnnnnnnnnnnnnnnnnnnnnnnnnnnnnnnnnnnnnnnnnnnnnnnnnnnnnnnnnnnnnnnnnnnnnnnnnnnnnnnnnnnnnnnnnnnnnnnnnnnnnnnnnnnnnnnnnnnnnnnnnnnnnnnnnnnnnnnnnnnnnnnnnnnnnnnnnnnnnnnnnnnnnnnnnnnnnnnnnnnnnnnnnnnnnnnnnnnnnnnnnnnnnnnnnnnnnnnnnnnnnnnnnnnnnnnnnnnnnnnnnnnnnnnnnnnnnnnnnnnnnnnnnnnnnnnnnnnnnnnnnnnnnnnnnnnnnnnnnnnnnnnnnnnnnnnnnnnnnnnnnnnnnnnnnnnnnnnnnnnnnnnnnnnnnnnnnnnnnnnnnnnnnnnnnnnnnnnnnnnnnnnnnnnnnnnnnnnnnnnnnnnnnnnnnnnnnnnnnnnnnnnnnnnnnnnnnnnnnnnnnnnnnnnnnnnnnnnnnnnnnnnnnnnnnnnnnnnnnnnnnnnnnnnnnnnnnnnnnnnnnnnnnnnnnnnnnnnnnnnnnnnnnnnnnnnnnnnnnnnnnnnnnnnnnnnnnnnnnnnnnnnnnnnnnnnnnnnnnnnnnnnnnnnnnnnnnnnnnnnnnnnnnnnnnnnnnnnnnnnnnnnnnnnnnnnnnnnnnnnnnnnnnnnnnnnnnnnnnnnnnnnnnnnnnnnnnnnnnnnnnnnnnnnnnnnnnnnnnnnnnnnnnnnnnnnnnnnnnnnnnnnnnnnnnnnnnnnnnnnnnnnnnnnnnnnnnnnnnnnnnnnnnnnnnnnnnnnnnnnnnnnnnnnnnnnnnnnnnnnnnnnnnnnnnnnnnnnnnnnnnnnnnnnnnnnnnnnnnnnnnnnnnnnnnnnnnnnnnnnnnnnnnnnnnnnnnnnnnnnnnnnnnnnnnnnnnnnnnnnnnnnnnnnnnnnnnnnnnnnnnnnnnnnnnnnnnnnnnnnnnnnnnnnnnnnnnnnnnnnnnnnnnnnnnnnnnnnnnnnnnnnnnnnnnnnnnnnnnnnnnnnnnnnnnnnnnnnnnnnnnnnnnnnnnnnnnnnnnnnnnnnnnnnnnnnnnnnnnnnnnnnnnnnnnnnnnnnnnnnnnnnnnnnnnnnnnnnnnnnnnnnnnnnnnnnnnnnnnnnnnnnnnnnnnnnnnnnnnnnnnnnnnnnnnnnnnnnnnnnnnnnnnnnnnnnnnnnnnnnnnnnnnnnnnnnnnnnnnnnnnnnnnnnnnnnnnnnnnnnnnnnnnnnnnnnnnnnnnnnnnnnnnnnnnnnnnnnnnnnnnnnnnnnnnnnnnnnnnnnnnnnnnnnnnnnnnnnnnnnnnnnnnnnnnnnnnnnnnnnnnnnnnnnnnnnnnnnnnnnnnnnnnnnnnnnnnnnnnnnnnnnnnnnnnnnnnnnnnnnnnnnnnnnnnnnnnnnnnnnnnnnnnnnnnnnnnnnnnnnnnnnnnnnnnnnnnnnnnnnnnnnnnnnnnnnnnnnnnnnnnnnnnnnnnnnnnnnnnnnnnnnnnnnnnnnnnnnnnnnnnnnnnnnnnnnnnnnnnnnnnnnnnnnnnnnnnnnnnnnnnnnnnnnnnnnnnnnnnnnnnnnnnnnnnnnnnnnnnnnnnnnnnnnnnnnnnnnnnnnnnnnnnnnnnnnnnnnnnnnnnnnnnnnnnnnnnnnnnnnnnnnnnnnnnnnnnnnnnnnnnnnnnnnnnnnnnnnnnnnnnnnnnnnnnnnnnnnnnnnnnnnnnnnnnnnnnnnnnnnnnnnnnnnnnnnnnnnnnnnnnnnnnnnnnnnnnnnnnnnnnnnnnnnnnnnnnnnnnnnnnnnnnnnnnnnnnnnnnnnnnnnnnnnnnnnnnnnnnnnnnnnnnnnnnnnnnnnnnnnnnnnnnnnnnnnnnnnnnnnnnnnnnnnnnnnnnnnnnnnnnnnnnnnnnnnnnnnnnnnnnnnnnnnnnnnnnnnnnnnnnnnnnnnnnnnnnnnnnnnnnnnnnnnnnnnnnnnnnnnnnnnnnnnnnnnnnnnnnnnnnnnnnnnnnnnnnnnnnnnnnnnnnnnnnnnnnnnnnnnnnnnnnnnnnnnnnnnnnnnnnnnnnnnnnnnnnnnnnnnnnnnnnnnnnnnnnnnnnnnnnnnnnnnnnnnnnnnnnnnnnnnnnnnnnnnnnnnnnnnnnnnnnnnnnnnnnnnnnnnnnnnnnnnnnnnnnnnnnnnnnnnnnnnnnnnnnnnnnnnnnnnnnnnnnnnnnnnnnnnnnnnnnnnnnnnnnnnnnnnnnnnnnnnnnnnnnnnnnnnnnnnnnnnnnnnnnnnnnnnnnnnnnnnnnnnnnnnnnnnnnnnnnnnnnnnnnnnnnnnnnnnnnnnnnnnnnnnnnnnnnnnnnnnnnnnnnnnnnnnnnnnnnnnnnnnnnnnnnnnnnnnnnnnnnnnnnnnnnnnnnnnnnnnnnnnnnnnnnnnnnnnnnnnnnnnnnnnnnnnnnnnnnnnnnnnnnnnnnnnnnnnnnnnnnnnnnnnnnnnnnnnnnnnnnnnnnnnnnnnnnnnnnnnnnnnnnnnnnnnnnnnnnnnnnnnnnnnnnnnnnnnnnnnnnnnnnnnnnnnnnnnnnnnnnnnnnnnnnnnnnnnnnnnnnnnnnnnnnnnnnnnnnnnnnnnnnnnnnnnnnnnnnnnnnnnnnnnnnnnnnnnnnnnnnnnnnnnnnnnnnnnnnnnnnnnnnnnnnnnnnnnnnnnnnnnnnnnnnnnnnnnnnnnnnnnnnnnnnnnnnnnnnnnnnnnnnnnnnnnnnnnnnnnnnnnnnnnnnnnnnnnnnnnnnnnnnnnnnnnnnnnnnnnnnnnnnnnnnnnnnnnnnnnnnnnnnnnnnnnnnnnnnnnnnnnnnnnnnnnnnnnnnnnnnnnnnnnnnnnnnnnnnnnnnnnnnnnnnnnnnnnnnnnnnnnnnnnnnnnnnnnnnnnnnnnnnnnnnnnnnnnnnnnnnnnnnnnnnnnnnnnnnnnnnnnnnnnnnnnnnnnnnnnnnnnnnnnnnnnnnnnnnnnnnnnnnnnnnnnnnnnnnnnnnnnnnnnnnnnnnnnnnnnnnnnnnnnnnnnnnnnnnnnnnnnnnnnnnnnnnnnnnnnnnnnnnnnnnnnnnnnnnnnnnnnnnnnnnnnnnnnnnnnnnnnnnnnnnnnnnnnnnnnnnnnnnnnnnnnnnnnnnnnnnnnnnnnnnnnnnnnnnnnnnnnnnnnnnnnnnnnnnnnnnnnnnnnnnnnnnnnnnnnnnnnnnnnnnnnnnnnnnnnnnnnnnnnnnnnnnnnnnnnnnnnnnnnnnnnnnnnnnnnnnnnnnnnnnnnnnnnnnnnnnnnnnnnnnnnnnnnnnnnnnnnnnnnnnnnnnnnnnnnnnnnnnnnnnnnnnnnnnnnnnnnnnnnnnnnnnnnnnnnnnnnnnnnnnnnnnnnnnnnnnnnnnnnnnnnnnnnnnnnnnnnnnnnnnnnnnnnnnnnnnnnnnnnnnnnnnnnnnnnnnnnnnnnnnnnnnnnnnnnnnnnnnnnnnnnnnnnnnnnnnnnnnnnnnnnnnnnnnnnnnnnnnnnnnnnnnnnnnnnnnnnnnnnnnnnnnnnnnnnnnnnnnnnnnnnnnnnnnnnnnnnnnnnnnnnnnnnnnnnnnnnnnnnnnnnnnnnnnnnnnnnnnnnnnnnnnnnnnnnnnnnnnnnnnnnnnnnnnnnnnnnnnnnnnnnnnnnnnnnnnnnnnnnnnnnnnnnnnnnnnnnnnnnnnnnnnnnnnnnnnnnnnnnnnnnnnnnnnnnnnnnnnnnnnnnnnnnnnnnnnnnnnnnnnnnnnnnnnnnnnnnnnnnnnnnnnnnnnnnnnnnnnnnnnnnnnnnnnnnnnnnnnnnnnnnnnnnnnnnnnnnnnnnnnnnnnnnnnnnnnnnnnnnnnnnnnnnnnnnnnnnnnnnnnnnnnnnnnnnnnnnnnnnnnnnnnnnnnnnnnnnnnnnnnnnnnnnnnnnnnnnnnnnnnnnnnnnnnnnnnnnnnnnnnnnnnnnnnnnnnnnnnnnnnnnnnnnnnnnnnnnnnnnnnnnnnnnnnnnnnnnnnnnnnnnnnnnnnnnnnnnnnnnnnnnnnnnnnnnnnnnnnnnnnnnnnnnnnnnnnnnnnnnnnnnnnnnnnnnnnnnnnnnnnnnnnnnnnnnnnnnnnnnnnnnnnnnnnnnnnnnnnnnnnnnnnnnnnnnnnnnnnnnnnnnnnnnnnnnnnnnnnnnnnnnnnnnnnnnnnnnnnnnnnnnnnnnnnnnnnnnnnnnnnnnnnnnnnnnnnnnnnnnnnnnnnnnnnnnnnnnnnnnnnnnnnnnnnnnnnnnnnnnnnnnnnnnnnnnnnnnnnnnnnnnnnnnnnnnnnnnnnnnnnnnnnnnnnnnnnnnnnnnnnnnnnnnnnnnnnnnnnnnnnnnnnnnnnnnnnnnnnnnnnnnnnnnnnnnnnnnnnnnnnnnnnnnnnnnnnnnnnnnnnnnnnnnnnnnnnnnnnnnnnnnnnnnnnnnnnnnnnnnnnnnnnnnnnnnnnnnnnnnnnnnnnnnnnnnnnnnnnnnnnnnnnnnnnnnnnnnnnnnnnnnnnnnnnnnnnnnnnnnnnnnnnnnnnnnnnnnnnnnnnnnnnnnnnnnnnnnnnnnnnnnnnnnnnnnnnnnnnnnnnnnnnnnnnnnnnnnnnnnnnnnnnnnnnnnnnnnnnnnnnnnnnnnnnnnnnnnnnnnnnnnnnnnnnnnnnnnnnnnnnnnnnnnnnnnnnnnnnnnnnnnnnnnnnnnnnnnnnnnnnnnnnnnnnnnnnnnnnnnnnnnnnnnnnnnnnnnnnnnnnnnnnnnnnnnnnnnnnnnnnnnnnnnnnnnnnnnnnnnnnnnnnnnnnnnnnnnnnnnnnnnnnnnnnnnnnnnnnnnnnnnnnnnnnnnnnnnnnnnnnnnnnnnnnnnnnnnnnnnnnnnnnnnnnnnnnnnnnnnnnnnnnnnnnnnnnnnnnnnnnnnnnnnnnnnnnnnnnnnnnnnnnnnnnnnnnnnnnnnnnnnnnnnnnnnnnnnnnnnnnnnnnnnnnnnnnnnnnnnnnnnnnnnnnnnnnnnnnnnnnnnnnnnnnnnnnnnnnnnnnnnnnnnnnnnnnnnnnnnnnnnnnnnnnnnnnnnnnnnnnnnnnnnnnnnnnnnnnnnnnnnnnnnnnnnnnnnnnnnnnnnnnnnnnnnnnnnnnnnnnnnnnnnnnnnnnnnnnnnnnnnnnnnnnnnnnnnnnnnnnnnnnnnnnnnnnnnnnnnnnnnnnnnnnnnnnnnnnnnnnnnnnnnnnnnnnnnnnnnnnnnnnnnnnnnnnnnnnnnnnnnnnnnnnnnnnnnnnnnnnnnnnnnnnnnnnnnnnnnnnnnnnnnnnnnnnnnnnnnnnnnnnnnnnnnnnnnnnnnnnnnnnnnnnnnnnnnnnnnnnnnnnnnnnnnnnnnnnnnnnnnnnnnnnnnnnnnnnnnnnnnnnnnnnnnnnnnnnnnnnnnnnnnnnnnnnnnnnnnnnnnnnnnnnnnnnnnnnnnnnnnnnnnnnnnnnnnnnnnnnnnnnnnnnnnnnnnnnnnnnnnnnnnnnnnnnnnnnnnnnnnnnnnnnnnnnnnnnnnnnnnnnnnnnnnnnnnnnnnnnnnnnnnnnnnnnnnnnnnnnnnnnnnnnnnnnnnnnnnnnnnnnnnnnnnnnnnnnnnnnnnnnnnnnnnnnnnnnnnnnnnnnnnnnnnnnnnnnnnnnnnnnnnnnnnnnnnnnnnnnnnnnnnnnnnnnnnnnnnnnnnnnnnnnnnnnnnnnnnnnnnnnnnnnnnnnnnnnnnnnnnnnnnnnnnnnnnnnnnnnnnnnnnnnnnnnnnnnnnnnnnnnnnnnnnnnnnnnnnnnnnnnnnnnnnnnnnnnnnnnnnnnnnnnnnnnnnnnnnnnnnnnnnnnnnnnnnnnnnnnnnnnnnnnnnnnnnnnnnnnnnnnnnnnnnnnnnnnnnnnnnnnnnnnnnnnnnnnnnnnnnnnnnnnnnnnnnnnnnnnnnnnnnnnnnnnnnnnnnnnnnnnnnnnnnnnnnnnnnnnnnnnnnnnnnnnnnnnnnnnnnnnnnnnnnnnnnnnnnnnnnnnnnnnnnnnnnnnnnnnnnnnnnnnnnnnnnnnnnnnnnnnnncgcttgaacagcccgcagcaacggcgcaaaccgacgccgaagcggacaagaagtttctgcgtgaaatctacgagccggtcgttgaaaaaactatcgcatccaccgccaaaggctcgcctttgcgccgccgcgcggcgaaagagcacgccaaagccctgctgaacaagaaaatcaaagaactggttgagaagccggatcatccgtcgaacgcagatgcaccagcagccgtgactgacaaaccgaaacgcggccacaagaagggaggcacagaatgagccagaccgctgaatacatcaagaggcttgcagacttgcaggaaggcgagcgctcgcggctgcgccgtctggccggacggccgctcgacgcaacgctccagggtttcgacctcttcacgggcctctggtggccgttgcggaaggtaagttcggcgaccccgcgccgggagccgtcatggctcgttgccaagctcttcggcgcgttccgcgtcccgcacatccgggccgattcaggcgcgggtccctctttgcctgaagtcctgggccgctgcgaaccgcacgacaaggatggccgcaagcgcttccgaactcgattcgacgcactgctttgctcgtccctgtcgtctcttgagccgcatttgcgctgggcgctaggggaagtcgccaaggcggtcgccgggcacgtgccgcatgcgcgggatgtgaaaggcatcgactgggtgcaactcctcgaccatctctccatttgggaccggggcgaggagcaccgcctcgatcgcgatattcgagatatatgggcggaacaatacctgaactcaaccaaaaaccaaaaatcaaaggaggactgaccatgttaattgaaatccacatgatccagaatcacagcccggcgaacctgaatcgggacgacctgggcgcgcccaagacctgcatcttcggcggcgtcacccgggcgcgcatttccagccagtgtctcaaacgcagcatccgccgcagcccggagttcgcggttgctttggagaaggatggaggtgtccgcacgcgcaggttggcgaatctgctggcgcggatcgcccatgctggagacttcgagttgacgcccgcaaagttggctgaacttctcaaagggaagtccatcgagaacgaagagacaaagaagctcgatgccattgctgcagaagccctggaactgggtggtgtgaagccaaaaagcaagaagaaagggaaaaagggcgaggaaggcgaggaaggcgaggacgccgaagcgctctccaagatgcttctcttcctctctacgacgacaatcgcgaagatggcgggagatctcaagaccgaatcagacgcaaaggcgcttaccgaaaagttcaagaaatacattgccgaaaatcccagcgtcccagacatcgctttgaatgggcgcatgactgaggttacaaagggtagcgttttcagcgacttgaacttcaccgtcgaagccgcgttgtccgcggcacacgccatctcgactcacgcggtcgtgaacgaggtagactacttcaccgctgccgacgacgtgcccggcgaggacgccggcgcgggtcaccttggcgaggccatgttcaactcggcctgtttctacaagcatttcgtcattgacttcgagcagttgaagaagaacctagcgaacgatgccgacctcgcctgcaagacagtacggtccttccttgaagcagccgccaatgccaacccctccggcaaacaacacgcacacgcggcattcaatctacccgacggagttctggtcgaagtcaaaactgagtcggccacacccgtcagctacgccaacgctttcgctgatccggtgccggaaaagtccgaacgcggcttgatcggcgaaagcatcgctagacttggccagtacgcccacgatctcgttgtaggttacggcatcgaggccgaacgtttctggttctcgccgaatctgcgccatcgcctgacctggatcgacaagagcatgaaggaacacgagcaagaacaatccgtggtcggttccgacgagttcggcgagttcgatcagttcgtccataaggtcatgggcaagatgggggcaaccgggacttctgcggaggcggcgaaatgaccgaagccaacacactcttcctccgcctcgagggccccctccaggcctggggcgacacgtcaaagttcgtcatccggcggaccatggatgcgccgaccaagtccggcgtgctgggcctggtgtgctgcgccatgggcctgtcgcgccaggcggtgcgggaacgcctgccggagctgaacgggcttgcgatgggtgtgcgcatcgaccggcaaggcacgcggtggtgggattaccacacggtaggagcgggaatcggcatgacaaccgctagtggcggtctgaagaccggcgccaagggcacgctcatcacgcggcgcgagtacctgtgcgacgcttcctttctcgtagccctacagggcgaaccggcgcttattgccgaactggccgccgcgatgcgaaacccaaaatggacgatctacctgggaagaaaatcctgtcctatgtcccgtccgccgttggagcatcaccccggcgattatcccgatctgctctccgctctcacggcggttgactggcgtccgcgtctcaaaggagacacacaaacggaggcggtagactgccttctcgactgggttgccacgccggaagaaccggaagcgccgttcgacgcggaaatctggtatgacgttcccttgaccttcgagccgccctcgcatcggccccgatttgtcattcggcggcagatccaagtcggcgaaaagggtgcattgaaggttgcggagaagcccgcgcagaactacacaccgcgcccgccacgcgcgagagccgactaccgcaatagtgaatatcggaaaatgcgagaggagcggcttgatcgcgatcatcatctgtgcgtcttatgcaagtcgcccgcgaccaccgttcatcacttcacctatcgccatgccggtggcgatgaacgcctggacgagttgcggtcgctgtgtcgcctgtgccacgacgccgtgacaatgatcgaatacggccagggcatggggatggaccgcatcaaccccgaagaggagcgctggagggaccagatcatcgaaaaacgcgcgaagattatcgcgttccggtcgctcgaaacccaaacccggcgccgcaaactcgccgcagaggaggtcgaataatgtacatgtcccatctcatgattgatatcggcgacaatcccgaccggccacggcccggccgtctttggttgcgcgatgtctaccacgttcatcagcggctgtgcatggcgtttccatcggaggcgcgggtaaagcgcgatgtcgagtttcttcagccgttccaagaggacgacttcccgttgctgcgcaacccggacgttaagccggaagacccgcgccacagtttcctgttccgtattgataccggcatccaggacggcgcgcgaacggttattcttgtccagtcggcgctgaagccggattgggactatgccttccagaatgcgcgctttcttgccgccgatccggaatggaaggaatacgcccccacgttcgaggttggacaggaactccgcttccgcatccgcatcaatctgagcaagaagagcaaggatctccgaaatacgcgggaggaaacagatgcgtatggccgcccaaaatcgcagagcaagcgcgtggcggtgacctgggacaaggaccagaaacccgatgaggcgatccgcgcgtggtttggagccaaggctgtccgtaatggtttcgcgttggataactttcaactcgtgcatctcggttgggtctcgggataccgtggcaagacgaaagtgccgtccggcgaggatcgtcccaaacacaagatgcggttccgatccgcgctcatcgagggaacgctggcggtcacggacgcgccgtgcttttcgcaggcggtcgcttcgggtatcggttccgcgaaggccttcgggttcggcctgctttcgcttgcgccggtacgtgcgggatgatcgcccatgaggactaaagacctgcatgaactgccgaaagtccgcgacaaactgacgtacctctacgtcgagcattgccgcgttgatcaagaggcgaaggccatcgcgattcatgacgtttcgggtgtgacgcccgtgccgtgcgctgcgctcacgctgcttatgctcggcccagggaccaacatcacccacgccgccgtgctgacgctcgccgattgcggctgccttaccgtgtggtgcggcgagcaaggcgtccgcttctatgcccaaggcatgggcgagacccggaacgccggaaacctcttgcatcaagcaagcctgtgcacgcaccgcgcttcgcgcttgaaagttgtccggcgcatgtacgaaatgcgctttgccgagaacctcgacccggcccttacgatccagcaaattcgcgggcgcgaaggagtccgcgtccgcgacacctacgcccgcgcctcgcgcgaatccggggtcgcgtggcagggccgatcctacacccgcaaccaatggaagtccgccgatcccgtcaaccgtgccctgtcctcggccaactcctgcctctacggcatctgccacgccgcgatcgtggccgcaggctactcccccgcgcttggtttcatacacaccggcaaacaactctccttcgtgtacgacattgccgacctgtacaagtgcgatatgaccgtgcccctggcattccgcgtggccgccgagtgttccaaagacatcgaacgcgaagtcaggctccggtgccgcgatgcgttcgccgaacagggcatcctccaacatattgtctccgacatcgcatgtgcgctcgcaattccgtccgaagaggcggacgacgaacccgacttcgacgctgatcccgcacgccccggagcgctctgggaccccgatcagggcgcttgtcccggcggcgtacaatacgcgcccggcgaaccgcccgcagagtagaaaaccatggtcatcatgatactcgaaaccgtacccgccagcctgcgcggccaactcactcgttggatgatcgaacccaaagcgggcgtctttgtcggcaacatttccgccatggtccgccaaaagctctgggagaaagcctgccaaggagtccgagaaggcggcgctatcctcatctacagcgcaaagaacgaacaaggtttcaaaatcgacttctggggaaagacctcaagatggataacaaactgggagggacttcaactggtaacaagacccaaagagccctaaaatacatgtgtcttccccacgcacgtgggggtgaaccgccacgagacccttttgtgggccagtccctcaagtcttccccacgcacgtgggggtgaaccgaaccgaacccggaaaccgggcgcggaacatgcgtcttccccacgcacgtgggggtgaaccgacaaaagaacaacaacacaacagcacaacagcagtcttccccacgcacgtgggggtgaaccgccgcgtctaccgcgcaagcccattgaccggaggtcttccccacgcacgtgggggtgaaccgtgtaacggcaccggcgaaagcgagcatgtgcggtcttccccacgcacgtgggggtgaaccgcaatcgccgaggagctcgacattactgttgcagtcttccccacgcacgtgggggtgaaccgccaggatatagaagcgctcttggtcgagaattgtcttccccacgcacgtgggggtgaaccgagggcttgcagttgcttgccgagaaccgcgcggtcttccccacgcacgtgggggtgaaccgttcacatcatcgtgtgtggccgcgccggctacgtcttccccacgcacgtgggggtgaaccgccccattccgagttgattgccacaccaccacggtcttccccacgcacgtgggggtgaaccgcgatacgttgttcaggaaggcgataagtggctgtcttccccacgcacgtgggggtgaaccgacttagaaaatgcacctgagtggctcaaaaacgtcttccccacgcacgtgggggtgaaccgtcccaggagtagaagtcggttgagttgtaattgtcttccccacgcacgtgggggtgaaccggggtgttttgtgttcgcagagttctacggggagtcttccccacgcacgtgggggtgaaccggtgaagtctttgcgcgcgtgctcgagatcgcggtcttccccacgcacgtgggggtgaaccggagcacatcggcacgatgaaagcacagcccctgtcttccccatgcacgtgggggtgaaccgtagttccctaatcatctctgctgcatccgttcgtcttccccacgcacgtgggggtgaaccggttgacggcacaaacttccgtggcatcgcgacgtcttccccacgcacgtgggggtgaaccgatcaagaaagccgagaaacagcaggagatggcgtcttccccacgcacgtgggggtgaaccggcggactatccggacggtcatgtgcatgccgagtcttccccacgcacgtgggggtgaacaggcgggtggcgttggtttcccgtttgcaagtgtgacgcgggaatgacgcgggcgtcgttggttttgagtatgtaggcggggaatgattccccgccttctttttctcacatagagacacggaggacgaagacgagcgaagtcagaagggcgaagttagaagtacgaagttagaagagcgaaggacgaaattggcttgtccttcgcctttcgcccttcgcacttcgctcttcttccttcgctcttccttcgctcttcctccggcctacagcctcccgcctcccgcctcaaaccctacggattgatggtgacggtcacggtgtcgctgaatgcgccgactcggttgtgtcggtcgacgtatgcggctcggtaggtgatcgtcaggggttcggggttcatggtgacgtgggtgtagggggaccggttgtcgtcatcaaggaagacccattctttttcttcggcgggcggaccgcttccgatgtagtaccagatgcgtacgccgcgtatgcctgcgggcagcgcgttttggcgcgcgttcaacgggtttggcccgaacttgattttagcccgtttgcgctcgccgacatcgatgtcgagcatcgggtggcctgcttcttcgatgctgacttcgctcagcggcgtaggctcgtcatcggcgacggtgatcccgagatcgcgccggatcccgtcggtcattgcgggatgatgctggatccgctggaccaggttgcgcaaccgcggctcgatggtatcggcgcgatcggcatcccgtatcgccacggcggcccgatacgcgttgtgggttgagacgacatcgtcttgctcgaccgagaaccgggtcgcgtcggcctggcaatcactgatctcgcccgaggtgacgtctaccgtcgtcccgtgaacaccgatttgtgtcccaaagttgttcatccaaaacgcgaaatcatcgacacttgttggcaaatatcctgccataccacacactcctttccctttgttgaccttcgtttcgttctacgacttcttcgttgcctgcctttcttctttcatctcctttccttttcgcctccggtctcccgcctacagcctcccgtctacggactaatcgtcacggtcacggtgtcgctgaacgcgccgacgcggttgtgtcggtcgacgtaggcggctctgtaggtaatcgtgaggggttgggcgttcatggtgacgtgggtgtagggggaccggttgtcgtcgtcgaggaagatccagtctttttcttcgggtgggggtccgcttccgatgtagtaccagaggcggacacggcgtatgccggcgggtaacgcgttgtggcgcgcgttcaacgggttcgggccgaacttgattttagcccgtttgcgctcgctgacatcgatgtcgagcatcgggtggccggcttcttcgatggatacggcggtttgcggcgtgggctcgctatcgggcaccgtaatgccgaggtcgcgccggatcccgtcggtcatggcggggtgatgctggatccgctggaccaggttgcgcaaccgcggttcgatggtatccgcgcggtcgttgtcgcggacggccaggccggcacggtacgcattgtgcgccgaggtaacgccatcgatgtcctcggcgaagcggtcgtccaagaaccgcagcatcagcacctcgagcgccgcgatgtcgagttcctcccaatacgctatgagtcgctgggcgaagtggcccagccaacgcgaaaactcatcgtctttcgccggaagataaccacccataatccgccacccctcctcgtttccatacccgttacgccatagcccatcaacacagcacgtcatcgaagaacacctacatggtaggccaccgcgcacggtatgtcaagcgctcttttgaggctgtaggctgtaggccggaggctggaggcttacctcgttcctgcccccgacctcgttcctgcccccgacctcgttcccaaatttcgcgccctcgttcctgcccccaacctcgttcccaaattgcatttgggaacgcacttgtgctaaagcttcgcttgcgccgccacccgtgactcgtccagcaggggcacgacggcgaatagcgccagagacggtgatcccaacctcgttgcgtgcgaggtcgtgcagtaattcagacggcggtgcagggtccaacccgcgttgccaacggacgccattcccggtggggcaaacaaagtttttggcgcaagtgcgttcccaaatccaatttgggaacgaggtgagatggctcctgcgcgttccacgtcaagcccttccttatcggccagccaatccgcccctttccgcattcgcttcgccatcctacgattactatcaggtcgtcggcattacacggggcgtgcccaagggcggcgcgaccacacgatgctgtccggtcaatgcgcggtagagctcctcaaagccttctgcctgatacatcttgaaatgagtaaacgtctttacaggcgttgggatacaggcactatggtcctcctcgaagagtaccgccctgaatttatcgcttaccgtttgtgcgtcgtacagatgctggtagattaaatgcccttcccaggttgcccccagccctgttcccggcttttcctcttttttgacgcggcacaggtatttcggcgaacataccataagcactgtggatgcctcgcggatgattttgtccatccatgccggccagccttccgctgggcccatttcgcccatatactggtctatccaggcgtccacaccccaggtgcgcagatcatcggccagttgccgcaccttggccgcaaaacccttgtcttcccacgcataactgatgaatactttaccctgtggaaccagcagcggcttctcttccatctttatctcccgttcttttggaatcgtatattcttcaatgccctccagcagttcgcgcacggtatactttctcttagcgccctgggggcgccacgagtacatgcggccctcgtctttctcgtattgttccaggtccttgtagtccaccgtcacgcccggatcgtcgggcaggctcaccatctccctgacttccagatgccgcatggcgccgtggatagccgcaagattatgccgcacgaccgtaagcgccctccggctggcaggttctctcttttcgacggacacgaatacctttttctcttcccggctgccccgaaccaatacgcgccgtccgtcaatccgcatcacgacgccattcttccagtaggtgttcttggagatcgcattgtgcatgcggacgataaatcgcggaatcaatcccgcgggcaggtagtcatagtgatattccagattcagcgagcttcccggctcaataccgtggtccggttcctgcgggggcagcaattcgggaatcaggcgcagccctgccttgttcggcggcgggtcgggaatggggaagcacagttcgaaaaggtccgcctccatcatggccaaaataaacatctggtgctttttcgggtagtccttctgtctatggaagatgcgcttcaggtcagcaagttcaagttggccgtgacgctcccggacaaccaggtcggtcaaaatcgcgtataccccttgcgtcacccatgtcggatcgagcacatacgtgtcgggcagcggaccgtacccgccgggactgtcataatgaagaagtgttccaagttgcttcaggtaggcaagcagcgcatttctgtcgccggccgtgagtttatgcttctcacagagcgtgtcatactcctcacggggaagattcttccgctttccggcctcgtgctccaaggcggtcttggccttcagatagctgccgggtaccttctggcggacattatcaagattccggacgcgctcgataatcgcctggcgaagcacctcaataccttccccgtggcggctcacatccttaccgtcgcaaactgtcttgcagaaggggtccggcaggttctccggataatccttgcgcagccgcgtgtcgtctggttcataactaccctcgtcgcgcttgttgagcaccacgatcaccggggaatccaccccaaacgtgcggatcttttccatccaataccggagtttgctctgttcttcattttcccgcgaatcaatcaccagaagatacaggctccgctccgtcaggaaaaactggtgcgttgcctgcatgatctcctgccccccgaaatcccagatattcacccggatcggctgcccgccctccgaggcgctcgccaccgtccaatccccaatctcaatgcccggggtccattccggatgttccaggcgtttcccctcggtaatccaatgaatcagcgcggtcttgcccacgcccggctcgcccacgaccagtattttcgcctcattcagcgggaacgtgtccggcccggacacaccgggttggctgtcttcctgtagacggaaataaaaatcgagaatcggttgcggcgcggcgggctgcgcgtctttgacgagaacctcctcccaggtgggcccgaggatttccggcggcaggcccaatgccggattggcgtgcagaaaaagtttctccagttttgttaaacgtcgaagcgactcgggcagcgtggaaagctgattgttgtcgaggtacagtcttgtcagcgcggtgagttggcctatctcccgcggcagcatggaaagctgattgttgttgagattcaattccgtcagcgcggtgagttggactatctccggcggcagcgtggaaagctgattgttgttgagccatagttccgtcagcgcggtgagttggcctatctccggcggcagcgtggaaagctgattgttgtcgaggtcgagtcttgtcagcgcggtgagttggcctatctccggcggcagcgtggaaagctgattgttgtcgagtcgcaattccgtcagcgcggtgagttggactatctccggcggcagcgtggaaagctgattgttgtggagtagcaattccctcagcgcggtgagttggcctatctccggcggcagtgtggaaagctgattgttgtagagtcgcaattccgtcagcgcggtgagttggcctatctccggcggcagcgtggtcaatcccattccgttgaggctcagccttgtcgcaccggtgcgttgcgcttccttaatcttctgcaaggcctcttgataggcgtcgtcgtgtttcatgatctattcctcccctgcgtttagcctctcgccgcacgacgcccgcgcgcgccacgcctgcttccggtcattcgtgcgggcctttcaatttcaaaccgttacgatagtataactcatgactcatttggtcaagtaatccgccggaaagggcgatagcatcgggttcggcgggtcgcgacccgccctacgcttggggcgaatgattattcgcccctacggattgatggtgacggtgacggtgtcgctgaatgcgcctactcggttttggcggtcgacgtaggcggctcggtaggtgatggtgaggggttcgggattcatggtgtggtgcgtgtagggcgagcggttgtcgtcgtttaggaacacccaatcgctctcattgggcggaggaccgttgccgatgtagtaccagatccgcacaccgcgcatccccgcgggc

SEQ ID NO: 1019 - DNA, 103324 bp, Artificial Sequence
  Synthetic Oligonucleotide
  misc_feature (1)..(91201): n is a, c, g, or t
nnnnnnnnnnnnnnnnnnnnnnnnnnnnnnnnnnnnnnnnnnnnnnnnnnnnnnnnnnnnnnnnnnnnnnnnnnnnnnnnnnnnnnnnnnnnnnnnnnnnnnnnnnnnnnnnnnnnnnnnnnnnnnnnnnnnnnnnnnnnnnnnnnnnnnnnnnnnnnnnnnnnnnnnnnnnnnnnnnnnnnnnnnnnnnnnnnnnnnnnnnnnnnnnnnnnnnnnnnnnnnnnnnnnnnnnnnnnnnnnnnnnnnnnnnnnnnnnnnnnnnnnnnnnnnnnnnnnnnnnnnnnnnnnnnnnnnnnnnnnnnnnnnnnnnnnnnnnnnnnnnnnnnnnnnnnnnnnnnnnnnnnnnnnnnnnnnnnnnnnnnnnnnnnnnnnnnnnnnnnnnnnnnnnnnnnnnnnnnnnnnnnnnnnnnnnnnnnnnnnnnnnnnnnnnnnnnnnnnnnnnnnnnnnnnnnnnnnnnnnnnnnnnnnnnnnnnnnnnnnnnnnnnnnnnnnnnnnnnnnnnnnnnnnnnnnnnnnnnnnnnnnnnnnnnnnnnnnnnnnnnnnnnnnnnnnnnnnnnnnnnnnnnnnnnnnnnnnnnnnnnnnnnnnnnnnnnnnnnnnnnnnnnnnnnnnnnnnnnnnnnnnnnnnnnnnnnnnnnnnnnnnnnnnnnnnnnnnnnnnnnnnnnnnnnnnnnnnnnnnnnnnnnnnnnnnnnnnnnnnnnnnnnnnnnnnnnnnnnnnnnnnnnnnnnnnnnnnnnnnnnnnnnnnnnnnnnnnnnnnnnnnnnnnnnnnnnnnnnnnnnnnnnnnnnnnnnnnnnnnnnnnnnnnnnnnnnnnnnnnnnnnnnnnnnnnnnnnnnnnnnnnnnnnnnnnnnnnnnnnnnnnnnnnnnnnnnnnnnnnnnnnnnnnnnnnnnnnnnnnnnnnnnnnnnnnnnnnnnnnnnnnnnnnnnnnnnnnnnnnnnnnnnnnnnnnnnnnnnnnnnnnnnnnnnnnnnnnnnnnnnnnnnnnnnnnnnnnnnnnnnnnnnnnnnnnnnnnnnnnnnnnnnnnnnnnnnnnnnnnnnnnnnnnnnnnnnnnnnnnnnnnnnnnnnnnnnnnnnnnnnnnnnnnnnnnnnnnnnnnnnnnnnnnnnnnnnnnnnnnnnnnnnnnnnnnnnnnnnnnnnnnnnnnnnnnnnnnnnnnnnnnnnnnnnnnnnnnnnnnnnnnnnnnnnnnnnnnnnnnnnnnnnnnnnnnnnnnnnnnnnnnnnnnnnnnnnnnnnnnnnnnnnnnnnnnnnnnnnnnnnnnnnnnnnnnnnnnnnnnnnnnnnnnnnnnnnnnnnnnnnnnnnnnnnnnnnnnnnnnnnnnnnnnnnnnnnnnnnnnnnnnnnnnnnnnnnnnnnnnnnnnnnnnnnnnnnnnnnnnnnnnnnnnnnnnnnnnnnnnnnnnnnnnnnnnnnnnnnnnnnnnnnnnnnnnnnnnnnnnnnnnnnnnnnnnnnnnnnnnnnnnnnnnnnnnnnnnnnnnnnnnnnnnnnnnnnnnnnnnnnnnnnnnnnnnnnnnnnnnnnnnnnnnnnnnnnnnnnnnnnnnnnnnnnnnnnnnnnnnnnnnnnnnnnnnnnnnnnnnnnnnnnnnnnnnnnnnnnnnnnnnnnnnnnnnnnnnnnnnnnnnnnnnnnnnnnnnnnnnnnnnnnnnnnnnnnnnnnnnnnnnnnnnnnnnnnnnnnnnnnnnnnnnnnnnnnnnnnnnnnnnnnnnnnnnnnnnnnnnnnnnnnnnnnnnnnnnnnnnnnnnnnnnnnnnnnnnnnnnnnnnnnnnnnnnnnnnnnnnnnnnnnnnnnnnnnnnnnnnnnnnnnnnnnnnnnnnnnnnnnnnnnnnnnnnnnnnnnnnnnnnnnnnnnnnnnnnnnnnnnnnnnnnnnnnnnnnnnnnnnnnnnnnnnnnnnnnnnnnnnnnnnnnnnnnnnnnnnnnnnnnnnnnnnnnnnnnnnnnnnnnnnnnnnnnnnnnnnnnnnnnnnnnnnnnnnnnnnnnnnnnnnnnnnnnnnnnnnnnnnnnnnnnnnnnnnnnnnnnnnnnnnnnnnnnnnnnnnnnnnnnnnnnnnnnnnnnnnnnnnnnnnnnnnnnnnnnnnnnnnnnnnnnnnnnnnnnnnnnnnnnnnnnnnnnnnnnnnnnnnnnnnnnnnnnnnnnnnnnnnnnnnnnnnnnnnnnnnnnnnnnnnnnnnnnnnnnnnnnnnnnnnnnnnnnnnnnnnnnnnnnnnnnnnnnnnnnnnnnnnnnnnnnnnnnnnnnnnnnnnnnnnnnnnnnnnnnnnnnnnnnnnnnnnnnnnnnnnnnnnnnnnnnnnnnnnnnnnnnnnnnnnnnnnnnnnnnnnnnnnnnnnnnnnnnnnnnnnnnnnnnnnnnnnnnnnnnnnnnnnnnnnnnnnnnnnnnnnnnnnnnnnnnnnnnnnnnnnnnnnnnnnnnnnnnnnnnnnnnnnnnnnnnnnnnnnnnnnnnnnnnnnnnnnnnnnnnnnnnnnnnnnnnnnnnnnnnnnnnnnnnnnnnnnnnnnnnnnnnnnnnnnnnnnnnnnnnnnnnnnnnnnnnnnnnnnnnnnnnnnnnnnnnnnnnnnnnnnnnnnnnnnnnnnnnnnnnnnnnnnnnnnnnnnnnnnnnnnnnnnnnnnnnnnnnnnnnnnnnnnnnnnnnnnnnnnnnnnnnnnnnnnnnnnnnnnnnnnnnnnnnnnnnnnnnnnnnnnnnnnnnnnnnnnnnnnnnnnnnnnnnnnnnnnnnnnnnnnnnnnnnnnnnnnnnnnnnnnnnnnnnnnnnnnnnnnnnnnnnnnnnnnnnnnnnnnnnnnnnnnnnnnnnnnnnnnnnnnnnnnnnnnnnnnnnnnnnnnnnnnnnnnnnnnnnnnnnnnnnnnnnnnnnnnnnnnnnnnnnnnnnnnnnnnnnnnnnnnnnnnnnnnnnnnnnnnnnnnnnnnnnnnnnnnnnnnnnnnnnnnnnnnnnnnnnnnnnnnnnnnnnnnnnnnnnnnnnnnnnnnnnnnnnnnnnnnnnnnnnnnnnnnnnnnnnnnnnnnnnnnnnnnnnnnnnnnnnnnnnnnnnnnnnnnnnnnnnnnnnnnnnnnnnnnnnnnnnnnnnnnnnnnnnnnnnnnnnnnnnnnnnnnnnnnnnnnnnnnnnnnnnnnnnnnnnnnnnnnnnnnnnnnnnnnnnnnnnnnnnnnnnnnnnnnnnnnnnnnnnnnnnnnnnnnnnnnnnnnnnnnnnnnnnnnnnnnnnnnnnnnnnnnnnnnnnnnnnnnnnnnnnnnnnnnnnnnnnnnnnnnnnnnnnnnnnnnnnnnnnnnnnnnnnnnnnnnnnnnnnnnnnnnnnnnnnnnnnnnnnnnnnnnnnnnnnnnnnnnnnnnnnnnnnnnnnnnnnnnnnnnnnnnnnnnnnnnnnnnnnnnnnnnnnnnnnnnnnnnnnnnnnnnnnnnnnnnnnnnnnnnnnnnnnnnnnnnnnnnnnnnnnnnnnnnnnnnnnnnnnnnnnnnnnnnnnnnnnnnnnnnnnnnnnnnnnnnnnnnnnnnnnnnnnnnnnnnnnnnnnnnnnnnnnnnnnnnnnnnnnnnnnnnnnnnnnnnnnnnnnnnnnnnnnnnnnnnnnnnnnnnnnnnnnnnnnnnnnnnnnnnnnnnnnnnnnnnnnnnnnnnnnnnnnnnnnnnnnnnnnnnnnnnnnnnnnnnnnnnnnnnnnnnnnnnnnnnnnnnnnnnnnnnnnnnnnnnnnnnnnnnnnnnnnnnnnnnnnnnnnnnnnnnnnnnnnnnnnnnnnnnnnnnnnnnnnnnnnnnnnnnnnnnnnnnnnnnnnnnnnnnnnnnnnnnnnnnnnnnnnnnnnnnnnnnnnnnnnnnnnnnnnnnnnnnnnnnnnnnnnnnnnnnnnnnnnnnnnnnnnnnnnnnnnnnnnnnnnnnnnnnnnnnnnnnnnnnnnnnnnnnnnnnnnnnnnnnnnnnnnnnnnnnnnnnnnnnnnnnnnnnnnnnnnnnnnnnnnnnnnnnnnnnnnnnnnnnnnnnnnnnnnnnnnnnnnnnnnnnnnnnnnnnnnnnnnnnnnnnnnnnnnnnnnnnnnnnnnnnnnnnnnnnnnnnnnnnnnnnnnnnnnnnnnnnnnnnnnnnnnnnnnnnnnnnnnnnnnnnnnnnnnnnnnnnnnnnnnnnnnnnnnnnnnnnnnnnnnnnnnnnnnnnnnnnnnnnnnnnnnnnnnnnnnnnnnnnnnnnnnnnnnnnnnnnnnnnnnnnnnnnnnnnnnnnnnnnnnnnnnnnnnnnnnnnnnnnnnnnnnnnnnnnnnnnnnnnnnnnnnnnnnnnnnnnnnnnnnnnnnnnnnnnnnnnnnnnnnnnnnnnnnnnnnnnnnnnnnnnnnnnnnnnnnnnnnnnnnnnnnnnnnnnnnnnnnnnnnnnnnnnnnnnnnnnnnnnnnnnnnnnnnnnnnnnnnnnnnnnnnnnnnnnnnnnnnnnnnnnnnnnnnnnnnnnnnnnnnnnnnnnnnnnnnnnnnnnnnnnnnnnnnnnnnnnnnnnnnnnnnnnnnnnnnnnnnnnnnnnnnnnnnnnnnnnnnnnnnnnnnnnnnnnnnnnnnnnnnnnnnnnnnnnnnnnnnnnnnnnnnnnnnnnnnnnnnnnnnnnnnnnnnnnnnnnnnnnnnnnnnnnnnnnnnnnnnnnnnnnnnnnnnnnnnnnnnnnnnnnnnnnnnnnnnnnnnnnnnnnnnnnnnnnnnnnnnnnnnnnnnnnnnnnnnnnnnnnnnnnnnnnnnnnnnnnnnnnnnnnnnnnnnnnnnnnnnnnnnnnnnnnnnnnnnnnnnnnnnnnnnnnnnnnnnnnnnnnnnnnnnnnnnnnnnnnnnnnnnnnnnnnnnnnnnnnnnnnnnnnnnnnnnnnnnnnnnnnnnnnnnnnnnnnnnnnnnnnnnnnnnnnnnnnnnnnnnnnnnnnnnnnnnnnnnnnnnnnnnnnnnnnnnnnnnnnnnnnnnnnnnnnnnnnnnnnnnnnnnnnnnnnnnnnnnnnnnnnnnnnnnnnnnnnnnnnnnnnnnnnnnnnnnnnnnnnnnnnnnnnnnnnnnnnnnnnnnnnnnnnnnnnnnnnnnnnnnnnnnnnnnnnnnnnnnnnnnnnnnnnnnnnnnnnnnnnnnnnnnnnnnnnnnnnnnnnnnnnnnnnnnnnnnnnnnnnnnnnnnnnnnnnnnnnnnnnnnnnnnnnnnnnnnnnnnnnnnnnnnnnnnnnnnnnnnnnnnnnnnnnnnnnnnnnnnnnnnnnnnnnnnnnnnnnnnnnnnnnnnnnnnnnnnnnnnnnnnnnnnnnnnnnnnnnnnnnnnnnnnnnnnnnnnnnnnnnnnnnnnnnnnnnnnnnnnnnnnnnnnnnnnnnnnnnnnnnnnnnnnnnnnnnnnnnnnnnnnnnnnnnnnnnnnnnnnnnnnnnnnnnnnnnnnnnnnnnnnnnnnnnnnnnnnnnnnnnnnnnnnnnnnnnnnnnnnnnnnnnnnnnnnnnnnnnnnnnnnnnnnnnnnnnnnnnnnnnnnnnnnnnnnnnnnnnnnnnnnnnnnnnnnnnnnnnnnnnnnnnnnnnnnnnnnnnnnnnnnnnnnnnnnnnnnnnnnnnnnnnnnnnnnnnnnnnnnnnnnnnnnnnnnnnnnnnnnnnnnnnnnnnnnnnnnnnnnnnnnnnnnnnnnnnnnnnnnnnnnnnnnnnnnnnnnnnnnnnnnnnnnnnnnnnnnnnnnnnnnnnnnnnnnnnnnnnnnnnnnnnnnnnnnnnnnnnnnnnnnnnnnnnnnnnnnnnnnnnnnnnnnnnnnnnnnnnnnnnnnnnnnnnnnnnnnnnnnnnnnnnnnnnnnnnnnnnnnnnnnnnnnnnnnnnnnnnnnnnnnnnnnnnnnnnnnnnnnnnnnnnnnnnnnnnnnnnnnnnnnnnnnnnnnnnnnnnnnnnnnnnnnnnnnnnnnnnnnnnnnnnnnnnnnnnnnnnnnnnnnnnnnnnnnnnnnnnnnnnnnnnnnnnnnnnnnnnnnnnnnnnnnnnnnnnnnnnnnnnnnnnnnnnnnnnnnnnnnnnnnnnnnnnnnnnnnnnnnnnnnnnnnnnnnnnnnnnnnnnnnnnnnnnnnnnnnnnnnnnnnnnnnnnnnnnnnnnnnnnnnnnnnnnnnnnnnnnnnnnnnnnnnnnnnnnnnnnnnnnnnnnnnnnnnnnnnnnnnnnnnnnnnnnnnnnnnnnnnnnnnnnnnnnnnnnnnnnnnnnnnnnnnnnnnnnnnnnnnnnnnnnnnnnnnnnnnnnnnnnnnnnnnnnnnnnnnnnnnnnnnnnnnnnnnnnnnnnnnnnnnnnnnnnnnnnnnnnnnnnnnnnnnnnnnnnnnnnnnnnnnnnnnnnnnnnnnnnnnnnnnnnnnnnnnnnnnnnnnnnnnnnnnnnnnnnnnnnnnnnnnnnnnnnnnnnnnnnnnnnnnnnnnnnnnnnnnnnnnnnnnnnnnnnnnnnnnnnnnnnnnnnnnnnnnnnnnnnnnnnnnnnnnnnnnnnnnnnnnnnnnnnnnnnnnnnnnnnnnnnnnnnnnnnnnnnnnnnnnnnnnnnnnnnnnnnnnnnnnnnnnnnnnnnnnnnnnnnnnnnnnnnnnnnnnnnnnnnnnnnnnnnnnnnnnnnnnnnnnnnnnnnnnnnnnnnnnnnnnnnnnnnnnnnnnnnnnnnnnnnnnnnnnnnnnnnnnnnnnnnnnnnnnnnnnnnnnnnnnnnnnnnnnnnnnnnnnnnnnnnnnnnnnnnnnnnnnnnnnnnnnnnnnnnnnnnnnnnnnnnnnnnnnnnnnnnnnnnnnnnnnnnnnnnnnnnnnnnnnnnnnnnnnnnnnnnnnnnnnnnnnnnnnnnnnnnnnnnnnnnnnnnnnnnnnnnnnnnnnnnnnnnnnnnnnnnnnnnnnnnnnnnnnnnnnnnnnnnnnnnnnnnnnnnnnnnnnnnnnnnnnnnnnnnnnnnnnnnnnnnnnnnnnnnnnnnnnnnnnnnnnnnnnnnnnnnnnnnnnnnnnnnnnnnnnnnnnnnnnnnnnnnnnnnnnnnnnnnnnnnnnnnnnnnnnnnnnnnnnnnnnnnnnnnnnnnnnnnnnnnnnnnnnnnnnnnnnnnnnnnnnnnnnnnnnnnnnnnnnnnnnnnnnnnnnnnnnnnnnnnnnnnnnnnnnnnnnnnnnnnnnnnnnnnnnnnnnnnnnnnnnnnnnnnnnnnnnnnnnnnnnnnnnnnnnnnnnnnnnnnnnnnnnnnnnnnnnnnnnnnnnnnnnnnnnnnnnnnnnnnnnnnnnnnnnnnnnnnnnnnnnnnnnnnnnnnnnnnnnnnnnnnnnnnnnnnnnnnnnnnnnnnnnnnnnnnnnnnnnnnnnnnnnnnnnnnnnnnnnnnnnnnnnnnnnnnnnnnnnnnnnnnnnnnnnnnnnnnnnnnnnnnnnnnnnnnnnnnnnnnnnnnnnnnnnnnnnnnnnnnnnnnnnnnnnnnnnnnnnnnnnnnnnnnnnnnnnnnnnnnnnnnnnnnnnnnnnnnnnnnnnnnnnnnnnnnnnnnnnnnnnnnnnnnnnnnnnnnnnnnnnnnnnnnnnnnnnnnnnnnnnnnnnnnnnnnnnnnnnnnnnnnnnnnnnnnnnnnnnnnnnnnnnnnnnnnnnnnnnnnnnnnnnnnnnnnnnnnnnnnnnnnnnnnnnnnnnnnnnnnnnnnnnnnnnnnnnnnnnnnnnnnnnnnnnnnnnnnnnnnnnnnnnnnnnnnnnnnnnnnnnnnnnnnnnnnnnnnnnnnnnnnnnnnnnnnnnnnnnnnnnnnnnnnnnnnnnnnnnnnnnnnnnnnnnnnnnnnnnnnnnnnnnnnnnnnnnnnnnnnnnnnnnnnnnnnnnnnnnnnnnnnnnnnnnnnnnnnnnnnnnnnnnnnnnnnnnnnnnnnnnnnnnnnnnnnnnnnnnnnnnnnnnnnnnnnnnnnnnnnnnnnnnnnnnnnnnnnnnnnnnnnnnnnnnnnnnnnnnnnnnnnnnnnnnnnnnnnnnnnnnnnnnnnnnnnnnnnnnnnnnnnnnnnnnnnnnnnnnnnnnnnnnnnnnnnnnnnnnnnnnnnnnnnnnnnnnnnnnnnnnnnnnnnnnnnnnnnnnnnnnnnnnnnnnnnnnnnnnnnnnnnnnnnnnnnnnnnnnnnnnnnnnnnnnnnnnnnnnnnnnnnnnnnnnnnnnnnnnnnnnnnnnnnnnnnnnnnnnnnnnnnnnnnnnnnnnnnnnnnnnnnnnnnnnnnnnnnnnnnnnnnnnnnnnnnnnnnnnnnnnnnnnnnnnnnnnnnnnnnnnnnnnnnnnnnnnnnnnnnnnnnnnnnnnnnnnnnnnnnnnnnnnnnnnnnnnnnnnnnnnnnnnnnnnnnnnnnnnnnnnnnnnnnnnnnnnnnnnnnnnnnnnnnnnnnnnnnnnnnnnnnnnnnnnnnnnnnnnnnnnnnnnnnnnnnnnnnnnnnnnnnnnnnnnnnnnnnnnnnnnnnnnnnnnnnnnnnnnnnnnnnnnnnnnnnnnnnnnnnnnnnnnnnnnnnnnnnnnnnnnnnnnnnnnnnnnnnnnnnnnnnnnnnnnnnnnnnnnnnnnnnnnnnnnnnnnnnnnnnnnnnnnnnnnnnnnnnnnnnnnnnnnnnnnnnnnnnnnnnnnnnnnnnnnnnnnnnnnnnnnnnnnnnnnnnnnnnnnnnnnnnnnnnnnnnnnnnnnnnnnnnnnnnnnnnnnnnnnnnnnnnnnnnnnnnnnnnnnnnnnnnnnnnnnnnnnnnnnnnnnnnnnnnnnnnnnnnnnnnnnnnnnnnnnnnnnnnnnnnnnnnnnnnnnnnnnnnnnnnnnnnnnnnnnnnnnnnnnnnnnnnnnnnnnnnnnnnnnnnnnnnnnnnnnnnnnnnnnnnnnnnnnnnnnnnnnnnnnnnnnnnnnnnnnnnnnnnnnnnnnnnnnnnnnnnnnnnnnnnnnnnnnnnnnnnnnnnnnnnnnnnnnnnnnnnnnnnnnnnnnnnnnnnnnnnnnnnnnnnnnnnnnnnnnnnnnnnnnnnnnnnnnnnnnnnnnnnnnnnnnnnnnnnnnnnnnnnnnnnnnnnnnnnnnnnnnnnnnnnnnnnnnnnnnnnnnnnnnnnnnnnnnnnnnnnnnnnnnnnnnnnnnnnnnnnnnnnnnnnnnnnnnnnnnnnnnnnnnnnnnnnnnnnnnnnnnnnnnnnnnnnnnnnnnnnnnnnnnnnnnnnnnnnnnnnnnnnnnnnnnnnnnnnnnnnnnnnnnnnnnnnnnnnnnnnnnnnnnnnnnnnnnnnnnnnnnnnnnnnnnnnnnnnnnnnnnnnnnnnnnnnnnnnnnnnnnnnnnnnnnnnnnnnnnnnnnnnnnnnnnnnnnnnnnnnnnnnnnnnnnnnnnnnnnnnnnnnnnnnnnnnnnnnnnnnnnnnnnnnnnnnnnnnnnnnnnnnnnnnnnnnnnnnnnnnnnnnnnnnnnnnnnnnnnnnnnnnnnnnnnnnnnnnnnnnnnnnnnnnnnnnnnnnnnnnnnnnnnnnnnnnnnnnnnnnnnnnnnnnnnnnnnnnnnnnnnnnnnnnnnnnnnnnnnnnnnnnnnnnnnnnnnnnnnnnnnnnnnnnnnnnnnnnnnnnnnnnnnnnnnnnnnnnnnnnnnnnnnnnnnnnnnnnnnnnnnnnnnnnnnnnnnnnnnnnnnnnnnnnnnnnnnnnnnnnnnnnnnnnnnnnnnnnnnnnnnnnnnnnnnnnnnnnnnnnnnnnnnnnnnnnnnnnnnnnnnnnnnnnnnnnnnnnnnnnnnnnnnnnnnnnnnnnnnnnnnnnnnnnnnnnnnnnnnnnnnnnnnnnnnnnnnnnnnnnnnnnnnnnnnnnnnnnnnnnnnnnnnnnnnnnnnnnnnnnnnnnnnnnnnnnnnnnnnnnnnnnnnnnnnnnnnnnnnnnnnnnnnnnnnnnnnnnnnnnnnnnnnnnnnnnnnnnnnnnnnnnnnnnnnnnnnnnnnnnnnnnnnnnnnnnnnnnnnnnnnnnnnnnnnnnnnnnnnnnnnnnnnnnnnnnnnnnnnnnnnnnnnnnnnnnnnnnnnnnnnnnnnnnnnnnnnnnnnnnnnnnnnnnnnnnnnnnnnnnnnnnnnnnnnnnnnnnnnnnnnnnnnnnnnnnnnnnnnnnnnnnnnnnnnnnnnnnnnnnnnnnnnnnnnnnnnnnnnnnnnnnnnnnnnnnnnnnnnnnnnnnnnnnnnnnnnnnnnnnnnnnnnnnnnnnnnnnnnnnnnnnnnnnnnnnnnnnnnnnnnnnnnnnnnnnnnnnnnnnnnnnnnnnnnnnnnnnnnnnnnnnnnnnnnnnnnnnnnnnnnnnnnnnnnnnnnnnnnnnnnnnnnnnnnnnnnnnnnnnnnnnnnnnnnnnnnnnnnnnnnnnnnnnnnnnnnnnnnnnnnnnnnnnnnnnnnnnnnnnnnnnnnnnnnnnnnnnnnnnnnnnnnnnnnnnnnnnnnnnnnnnnnnnnnnnnnnnnnnnnnnnnnnnnnnnnnnnnnnnnnnnnnnnnnnnnnnnnnnnnnnnnnnnnnnnnnnnnnnnnnnnnnnnnnnnnnnnnnnnnnnnnnnnnnnnnnnnnnnnnnnnnnnnnnnnnnnnnnnnnnnnnnnnnnnnnnnnnnnnnnnnnnnnnnnnnnnnnnnnnnnnnnnnnnnnnnnnnnnnnnnnnnnnnnnnnnnnnnnnnnnnnnnnnnnnnnnnnnnnnnnnnnnnnnnnnnnnnnnnnnnnnnnnnnnnnnnnnnnnnnnnnnnnnnnnnnnnnnnnnnnnnnnnnnnnnnnnnnnnnnnnnnnnnnnnnnnnnnnnnnnnnnnnnnnnnnnnnnnnnnnnnnnnnnnnnnnnnnnnnnnnnnnnnnnnnnnnnnnnnnnnnnnnnnnnnnnnnnnnnnnnnnnnnnnnnnnnnnnnnnnnnnnnnnnnnnnnnnnnnnnnnnnnnnnnnnnnnnnnnnnnnnnnnnnnnnnnnnnnnnnnnnnnnnnnnnnnnnnnnnnnnnnnnnnnnnnnnnnnnnnnnnnnnnnnnnnnnnnnnnnnnnnnnnnnnnnnnnnnnnnnnnnnnnnnnnnnnnnnnnnnnnnnnnnnnnnnnnnnnnnnnnnnnnnnnnnnnnnnnnnnnnnnnnnnnnnnnnnnnnnnnnnnnnnnnnnnnnnnnnnnnnnnnnnnnnnnnnnnnnnnnnnnnnnnnnnnnnnnnnnnnnnnnnnnnnnnnnnnnnnnnnnnnnnnnnnnnnnnnnnnnnnnnnnnnnnnnnnnnnnnnnnnnnnnnnnnnnnnnnnnnnnnnnnnnnnnnnnnnnnnnnnnnnnnnnnnnnnnnnnnnnnnnnnnnnnnnnnnnnnnnnnnnnnnnnnnnnnnnnnnnnnnnnnnnnnnnnnnnnnnnnnnnnnnnnnnnnnnnnnnnnnnnnnnnnnnnnnnnnnnnnnnnnnnnnnnnnnnnnnnnnnnnnnnnnnnnnnnnnnnnnnnnnnnnnnnnnnnnnnnnnnnnnnnnnnnnnnnnnnnnnnnnnnnnnnnnnnnnnnnnnnnnnnnnnnnnnnnnnnnnnnnnnnnnnnnnnnnnnnnnnnnnnnnnnnnnnnnnnnnnnnnnnnnnnnnnnnnnnnnnnnnnnnnnnnnnnnnnnnnnnnnnnnnnnnnnnnnnnnnnnnnnnnnnnnnnnnnnnnnnnnnnnnnnnnnnnnnnnnnnnnnnnnnnnnnnnnnnnnnnnnnnnnnnnnnnnnnnnnnnnnnnnnnnnnnnnnnnnnnnnnnnnnnnnnnnnnnnnnnnnnnnnnnnnnnnnnnnnnnnnnnnnnnnnnnnnnnnnnnnnnnnnnnnnnnnnnnnnnnnnnnnnnnnnnnnnnnnnnnnnnnnnnnnnnnnnnnnnnnnnnnnnnnnnnnnnnnnnnnnnnnnnnnnnnnnnnnnnnnnnnnnnnnnnnnnnnnnnnnnnnnnnnnnnnnnnnnnnnnnnnnnnnnnnnnnnnnnnnnnnnnnnnnnnnnnnnnnnnnnnnnnnnnnnnnnnnnnnnnnnnnnnnnnnnnnnnnnnnnnnnnnnnnnnnnnnnnnnnnnnnnnnnnnnnnnnnnnnnnnnnnnnnnnnnnnnnnnnnnnnnnnnnnnnnnnnnnnnnnnnnnnnnnnnnnnnnnnnnnnnnnnnnnnnnnnnnnnnnnnnnnnnnnnnnnnnnnnnnnnnnnnnnnnnnnnnnnnnnnnnnnnnnnnnnnnnnnnnnnnnnnnnnnnnnnnnnnnnnnnnnnnnnnnnnnnnnnnnnnnnnnnnnnnnnnnnnnnnnnnnnnnnnnnnnnnnnnnnnnnnnnnnnnnnnnnnnnnnnnnnnnnnnnnnnnnnnnnnnnnnnnnnnnnnnnnnnnnnnnnnnnnnnnnnnnnnnnnnnnnnnnnnnnnnnnnnnnnnnnnnnnnnnnnnnnnnnnnnnnnnnnnnnnnnnnnnnnnnnnnnnnnnnnnnnnnnnnnnnnnnnnnnnnnnnnnnnnnnnnnnnnnnnnnnnnnnnnnnnnnnnnnnnnnnnnnnnnnnnnnnnnnnnnnnnnnnnnnnnnnnnnnnnnnnnnnnnnnnnnnnnnnnnnnnnnnnnnnnnnnnnnnnnnnnnnnnnnnnnnnnnnnnnnnnnnnnnnnnnnnnnnnnnnnnnnnnnnnnnnnnnnnnnnnnnnnnnnnnnnnnnnnnnnnnnnnnnnnnnnnnnnnnnnnnnnnnnnnnnnnnnnnnnnnnnnnnnnnnnnnnnnnnnnnnnnnnnnnnnnnnnnnnnnnnnnnnnnnnnnnnnnnnnnnnnnnnnnnnnnnnnnnnnnnnnnnnnnnnnnnnnnnnnnnnnnnnnnnnnnnnnnnnnnnnnnnnnnnnnnnnnnnnnnnnnnnnnnnnnnnnnnnnnnnnnnnnnnnnnnnnnnnnnnnnnnnnnnnnnnnnnnnnnnnnnnnnnnnnnnnnnnnnnnnnnnnnnnnnnnnnnnnnnnnnnnnnnnnnnnnnnnnnnnnnnnnnnnnnnnnnnnnnnnnnnnnnnnnnnnnnnnnnnnnnnnnnnnnnnnnnnnnnnnnnnnnnnnnnnnnnnnnnnnnnnnnnnnnnnnnnnnnnnnnnnnnnnnnnnnnnnnnnnnnnnnnnnnnnnnnnnnnnnnnnnnnnnnnnnnnnnnnnnnnnnnnnnnnnnnnnnnnnnnnnnnnnnnnnnnnnnnnnnnnnnnnnnnnnnnnnnnnnnnnnnnnnnnnnnnnnnnnnnnnnnnnnnnnnnnnnnnnnnnnnnnnnnnnnnnnnnnnnnnnnnnnnnnnnnnnnnnnnnnnnnnnnnnnnnnnnnnnnnnnnnnnnnnnnnnnnnnnnnnnnnnnnnnnnnnnnnnnnnnnnnnnnnnnnnnnnnnnnnnnnnnnnnnnnnnnnnnnnnnnnnnnnnnnnnnnnnnnnnnnnnnnnnnnnnnnnnnnnnnnnnnnnnnnnnnnnnnnnnnnnnnnnnnnnnnnnnnnnnnnnnnnnnnnnnnnnnnnnnnnnnnnnnnnnnnnnnnnnnnnnnnnnnnnnnnnnnnnnnnnnnnnnnnnnnnnnnnnnnnnnnnnnnnnnnnnnnnnnnnnnnnnnnnnnnnnnnnnnnnnnnnnnnnnnnnnnnnnnnnnnnnnnnnnnnnnnnnnnnnnnnnnnnnnnnnnnnnnnnnnnnnnnnnnnnnnnnnnnnnnnnnnnnnnnnnnnnnnnnnnnnnnnnnnnnnnnnnnnnnnnnnnnnnnnnnnnnnnnnnnnnnnnnnnnnnnnnnnnnnnnnnnnnnnnnnnnnnnnnnnnnnnnnnnnnnnnnnnnnnnnnnnnnnnnnnnnnnnnnnnnnnnnnnnnnnnnnnnnnnnnnnnnnnnnnnnnnnnnnnnnnnnnnnnnnnnnnnnnnnnnnnnnnnnnnnnnnnnnnnnnnnnnnnnnnnnnnnnnnnnnnnnnnnnnnnnnnnnnnnnnnnnnnnnnnnnnnnnnnnnnnnnnnnnnnnnnnnnnnnnnnnnnnnnnnnnnnnnnnnnnnnnnnnnnnnnnnnnnnnnnnnnnnnnnnnnnnnnnnnnnnnnnnnnnnnnnnnnnnnnnnnnnnnnnnnnnnnnnnnnnnnnnnnnnnnnnnnnnnnnnnnnnnnnnnnnnnnnnnnnnnnnnnnnnnnnnnnnnnnnnnnnnnnnnnnnnnnnnnnnnnnnnnnnnnnnnnnnnnnnnnnnnnnnnnnnnnnnnnnnnnnnnnnnnnnnnnnnnnnnnnnnnnnnnnnnnnnnnnnnnnnnnnnnnnnnnnnnnnnnnnnnnnnnnnnnnnnnnnnnnnnnnnnnnnnnnnnnnnnnnnnnnnnnnnnnnnnnnnnnnnnnnnnnnnnnnnnnnnnnnnnnnnnnnnnnnnnnnnnnnnnnnnnnnnnnnnnnnnnnnnnnnnnnnnnnnnnnnnnnnnnnnnnnnnnnnnnnnnnnnnnnnnnnnnnnnnnnnnnnnnnnnnnnnnnnnnnnnnnnnnnnnnnnnnnnnnnnnnnnnnnnnnnnnnnnnnnnnnnnnnnnnnnnnnnnnnnnnnnnnnnnnnnnnnnnnnnnnnnnnnnnnnnnnnnnnnnnnnnnnnnnnnnnnnnnnnnnnnnnnnnnnnnnnnnnnnnnnnnnnnnnnnnnnnnnnnnnnnnnnnnnnnnnnnnnnnnnnnnnnnnnnnnnnnnnnnnnnnnnnnnnnnnnnnnnnnnnnnnnnnnnnnnnnnnnnnnnnnnnnnnnnnnnnnnnnnnnnnnnnnnnnnnnnnnnnnnnnnnnnnnnnnnnnnnnnnnnnnnnnnnnnnnnnnnnnnnnnnnnnnnnnnnnnnnnnnnnnnnnnnnnnnnnnnnnnnnnnnnnnnnnnnnnnnnnnnnnnnnnnnnnnnnnnnnnnnnnnnnnnnnnnnnnnnnnnnnnnnnnnnnnnnnnnnnnnnnnnnnnnnnnnnnnnnnnnnnnnnnnnnnnnnnnnnnnnnnnnnnnnnnnnnnnnnnnnnnnnnnnnnnnnnnnnnnnnnnnnnnnnnnnnnnnnnnnnnnnnnnnnnnnnnnnnnnnnnnnnnnnnnnnnnnnnnnnnnnnnnnnnnnnnnnnnnnnnnnnnnnnnnnnnnnnnnnnnnnnnnnnnnnnnnnnnnnnnnnnnnnnnnnnnnnnnnnnnnnnnnnnnnnnnnnnnnnnnnnnnnnnnnnnnnnnnnnnnnnnnnnnnnnnnnnnnnnnnnnnnnnnnnnnnnnnnnnnnnnnnnnnnnnnnnnnnnnnnnnnnnnnnnnnnnnnnnnnnnnnnnnnnnnnnnnnnnnnnnnnnnnnnnnnnnnnnnnnnnnnnnnnnnnnnnnnnnnnnnnnnnnnnnnnnnnnnnnnnnnnnnnnnnnnnnnnnnnnnnnnnnnnnnnnnnnnnnnnnnnnnnnnnnnnnnnnnnnnnnnnnnnnnnnnnnnnnnnnnnnnnnnnnnnnnnnnnnnnnnnnnnnnnnnnnnnnnnnnnnnnnnnnnnnnnnnnnnnnnnnnnnnnnnnnnnnnnnnnnnnnnnnnnnnnnnnnnnnnnnnnnnnnnnnnnnnnnnnnnnnnnnnnnnnnnnnnnnnnnnnnnnnnnnnnnnnnnnnnnnnnnnnnnnnnnnnnnnnnnnnnnnnnnnnnnnnnnnnnnnnnnnnnnnnnnnnnnnnnnnnnnnnnnnnnnnnnnnnnnnnnnnnnnnnnnnnnnnnnnnnnnnnnnnnnnnnnnnnnnnnnnnnnnnnnnnnnnnnnnnnnnnnnnnnnnnnnnnnnnnnnnnnnnnnnnnnnnnnnnnnnnnnnnnnnnnnnnnnnnnnnnnnnnnnnnnnnnnnnnnnnnnnnnnnnnnnnnnnnnnnnnnnnnnnnnnnnnnnnnnnnnnnnnnnnnnnnnnnnnnnnnnnnnnnnnnnnnnnnnnnnnnnnnnnnnnnnnnnnnnnnnnnnnnnnnnnnnnnnnnnnnnnnnnnnnnnnnnnnnnnnnnnnnnnnnnnnnnnnnnnnnnnnnnnnnnnnnnnnnnnnnnnnnnnnnnnnnnnnnnnnnnnnnnnnnnnnnnnnnnnnnnnnnnnnnnnnnnnnnnnnnnnnnnnnnnnnnnnnnnnnnnnnnnnnnnnnnnnnnnnnnnnnnnnnnnnnnnnnnnnnnnnnnnnnnnnnnnnnnnnnnnnnnnnnnnnnnnnnnnnnnnnnnnnnnnnnnnnnnnnnnnnnnnnnnnnnnnnnnnnnnnnnnnnnnnnnnnnnnnnnnnnnnnnnnnnnnnnnnnnnnnnnnnnnnnnnnnnnnnnnnnnnnnnnnnnnnnnnnnnnnnnnnnnnnnnnnnnnnnnnnnnnnnnnnnnnnnnnnnnnnnnnnnnnnnnnnnnnnnnnnnnnnnnnnnnnnnnnnnnnnnnnnnnnnnnnnnnnnnnnnnnnnnnnnnnnnnnnnnnnnnnnnnnnnnnnnnnnnnnnnnnnnnnnnnnnnnnnnnnnnnnnnnnnnnnnnnnnnnnnnnnnnnnnnnnnnnnnnnnnnnnnnnnnnnnnnnnnnnnnnnnnnnnnnnnnnnnnnnnnnnnnnnnnnnnnnnnnnnnnnnnnnnnnnnnnnnnnnnnnnnnnnnnnnnnnnnnnnnnnnnnnnnnnnnnnnnnnnnnnnnnnnnnnnnnnnnnnnnnnnnnnnnnnnnnnnnnnnnnnnnnnnnnnnnnnnnnnnnnnnnnnnnnnnnnnnnnnnnnnnnnnnnnnnnnnnnnnnnnnnnnnnnnnnnnnnnnnnnnnnnnnnnnnnnnnnnnnnnnnnnnnnnnnnnnnnnnnnnnnnnnnnnnnnnnnnnnnnnnnnnnnnnnnnnnnnnnnnnnnnnnnnnnnnnnnnnnnnnnnnnnnnnnnnnnnnnnnnnnnnnnnnnnnnnnnnnnnnnnnnnnnnnnnnnnnnnnnnnnnnnnnnnnnnnnnnnnnnnnnnnnnnnnnnnnnnnnnnnnnnnnnnnnnnnnnnnnnnnnnnnnnnnnnnnnnnnnnnnnnnnnnnnnnnnnnnnnnnnnnnnnnnnnnnnnnnnnnnnnnnnnnnnnnnnnnnnnnnnnnnnnnnnnnnnnnnnnnnnnnnnnnnnnnnnnnnnnnnnnnnnnnnnnnnnnnnnnnnnnnnnnnnnnnnnnnnnnnnnnnnnnnnnnnnnnnnnnnnnnnnnnnnnnnnnnnnnnnnnnnnnnnnnnnnnnnnnnnnnnnnnnnnnnnnnnnnnnnnnnnnnnnnnnnnnnnnnnnnnnnnnnnnnnnnnnnnnnnnnnnnnnnnnnnnnnnnnnnnnnnnnnnnnnnnnnnnnnnnnnnnnnnnnnnnnnnnnnnnnnnnnnnnnnnnnnnnnnnnnnnnnnnnnnnnnnnnnnnnnnnnnnnnnnnnnnnnnnnnnnnnnnnnnnnnnnnnnnnnnnnnnnnnnnnnnnnnnnnnnnnnnnnnnnnnnnnnnnnnnnnnnnnnnnnnnnnnnnnnnnnnnnnnnnnnnnnnnnnnnnnnnnnnnnnnnnnnnnnnnnnnnnnnnnnnnnnnnnnnnnnnnnnnnnnnnnnnnnnnnnnnnnnnnnnnnnnnnnnnnnnnnnnnnnnnnnnnnnnnnnnnnnnnnnnnnnnnnnnnnnnnnnnnnnnnnnnnnnnnnnnnnnnnnnnnnnnnnnnnnnnnnnnnnnnnnnnnnnnnnnnnnnnnnnnnnnnnnnnnnnnnnnnnnnnnnnnnnnnnnnnnnnnnnnnnnnnnnnnnnnnnnnnnnnnnnnnnnnnnnnnnnnnnnnnnnnnnnnnnnnnnnnnnnnnnnnnnnnnnnnnnnnnnnnnnnnnnnnnnnnnnnnnnnnnnnnnnnnnnnnnnnnnnnnnnnnnnnnnnnnnnnnnnnnnnnnnnnnnnnnnnnnnnnnnnnnnnnnnnnnnnnnnnnnnnnnnnnnnnnnnnnnnnnnnnnnnnnnnnnnnnnnnnnnnnnnnnnnnnnnnnnnnnnnnnnnnnnnnnnnnnnnnnnnnnnnnnnnnnnnnnnnnnnnnnnnnnnnnnnnnnnnnnnnnnnnnnnnnnnnnnnnnnnnnnnnnnnnnnnnnnnnnnnnnnnnnnnnnnnnnnnnnnnnnnnnnnnnnnnnnnnnnnnnnnnnnnnnnnnnnnnnnnnnnnnnnnnnnnnnnnnnnnnnnnnnnnnnnnnnnnnnnnnnnnnnnnnnnnnnnnnnnnnnnnnnnnnnnnnnnnnnnnnnnnnnnnnnnnnnnnnnnnnnnnnnnnnnnnnnnnnnnnnnnnnnnnnnnnnnnnnnnnnnnnnnnnnnnnnnnnnnnnnnnnnnnnnnnnnnnnnnnnnnnnnnnnnnnnnnnnnnnnnnnnnnnnnnnnnnnnnnnnnnnnnnnnnnnnnnnnnnnnnnnnnnnnnnnnnnnnnnnnnnnnnnnnnnnnnnnnnnnnnnnnnnnnnnnnnnnnnnnnnnnnnnnnnnnnnnnnnnnnnnnnnnnnnnnnnnnnnnnnnnnnnnnnnnnnnnnnnnnnnnnnnnnnnnnnnnnnnnnnnnnnnnnnnnnnnnnnnnnnnnnnnnnnnnnnnnnnnnnnnnnnnnnnnnnnnnnnnnnnnnnnnnnnnnnnnnnnnnnnnnnnnnnnnnnnnnnnnnnnnnnnnnnnnnnnnnnnnnnnnnnnnnnnnnnnnnnnnnnnnnnnnnnnnnnnnnnnnnnnnnnnnnnnnnnnnnnnnnnnnnnnnnnnnnnnnnnnnnnnnnnnnnnnnnnnnnnnnnnnnnnnnnnnnnnnnnnnnnnnnnnnnnnnnnnnnnnnnnnnnnnnnnnnnnnnnnnnnnnnnnnnnnnnnnnnnnnnnnnnnnnnnnnnnnnnnnnnnnnnnnnnnnnnnnnnnnnnnnnnnnnnnnnnnnnnnnnnnnnnnnnnnnnnnnnnnnnnnnnnnnnnnnnnnnnnnnnnnnnnnnnnnnnnnnnnnnnnnnnnnnnnnnnnnnnnnnnnnnnnnnnnnnnnnnnnnnnnnnnnnnnnnnnnnnnnnnnnnnnnnnnnnnnnnnnnnnnnnnnnnnnnnnnnnnnnnnnnnnnnnnnnnnnnnnnnnnnnnnnnnnnnnnnnnnnnnnnnnnnnnnnnnnnnnnnnnnnnnnnnnnnnnnnnnnnnnnnnnnnnnnnnnnnnnnnnnnnnnnnnnnnnnnnnnnnnnnnnnnnnnnnnnnnnnnnnnnnnnnnnnnnnnnnnnnnnnnnnnnnnnnnnnnnnnnnnnnnnnnnnnnnnnnnnnnnnnnnnnnnnnnnnnnnnnnnnnnnnnnnnnnnnnnnnnnnnnnnnnnnnnnnnnnnnnnnnnnnnnnnnnnnnnnnnnnnnnnnnnnnnnnnnnnnnnnnnnnnnnnnnnnnnnnnnnnnnnnnnnnnnnnnnnnnnnnnnnnnnnnnnnnnnnnnnnnnnnnnnnnnnnnnnnnnnnnnnnnnnnnnnnnnnnnnnnnnnnnnnnnnnnnnnnnnnnnnnnnnnnnnnnnnnnnnnnnnnnnnnnnnnnnnnnnnnnnnnnnnnnnnnnnnnnnnnnnnnnnnnnnnnnnnnnnnnnnnnnnnnnnnnnnnnnnnnnnnnnnnnnnnnnnnnnnnnnnnnnnnnnnnnnnnnnnnnnnnnnnnnnnnnnnnnnnnnnnnnnnnnnnnnnnnnnnnnnnnnnnnnnnnnnnnnnnnnnnnnnnnnnnnnnnnnnnnnnnnnnnnnnnnnnnnnnnnnnnnnnnnnnnnnnnnnnnnnnnnnnnnnnnnnnnnnnnnnnnnnnnnnnnnnnnnnnnnnnnnnnnnnnnnnnnnnnnnnnnnnnnnnnnnnnnnnnnnnnnnnnnnnnnnnnnnnnnnnnnnnnnnnnnnnnnnnnnnnnnnnnnnnnnnnnnnnnnnnnnnnnnnnnnnnnnnnnnnnnnnnnnnnnnnnnnnnnnnnnnnnnnnnnnnnnnnnnnnnnnnnnnnnnnnnnnnnnnnnnnnnnnnnnnnnnnnnnnnnnnnnnnnnnnnnnnnnnnnnnnnnnnnnnnnnnnnnnnnnnnnnnnnnnnnnnnnnnnnnnnnnnnnnnnnnnnnnnnnnnnnnnnnnnnnnnnnnnnnnnnnnnnnnnnnnnnnnnnnnnnnnnnnnnnnnnnnnnnnnnnnnnnnnnnnnnnnnnnnnnnnnnnnnnnnnnnnnnnnnnnnnnnnnnnnnnnnnnnnnnnnnnnnnnnnnnnnnnnnnnnnnnnnnnnnnnnnnnnnnnnnnnnnnnnnnnnnnnnnnnnnnnnnnnnnnnnnnnnnnnnnnnnnnnnnnnnnnnnnnnnnnnnnnnnnnnnnnnnnnnnnnnnnnnnnnnnnnnnnnnnnnnnnnnnnnnnnnnnnnnnnnnnnnnnnnnnnnnnnnnnnnnnnnnnnnnnnnnnnnnnnnnnnnnnnnnnnnnnnnnnnnnnnnnnnnnnnnnnnnnnnnnnnnnnnnnnnnnnnnnnnnnnnnnnnnnnnnnnnnnnnnnnnnnnnnnnnnnnnnnnnnnnnnnnnnnnnnnnnnnnnnnnnnnnnnnnnnnnnnnnnnnnnnnnnnnnnnnnnnnnnnnnnnnnnnnnnnnnnnnnnnnnnnnnnnnnnnnnnnnnnnnnnnnnnnnnnnnnnnnnnnnnnnnnnnnnnnnnnnnnnnnnnnnnnnnnnnnnnnnnnnnnnnnnnnnnnnnnnnnnnnnnnnnnnnnnnnnnnnnnnnnnnnnnnnnnnnnnnnnnnnnnnnnnnnnnnnnnnnnnnnnnnnnnnnnnnnnnnnnnnnnnnnnnnnnnnnnnnnnnnnnnnnnnnnnnnnnnnnnnnnnnnnnnnnnnnnnnnnnnnnnnnnnnnnnnnnnnnnnnnnnnnnnnnnnnnnnnnnnnnnnnnnnnnnnnnnnnnnnnnnnnnnnnnnnnnnnnnnnnnnnnnnnnnnnnnnnnnnnnnnnnnnnnnnnnnnnnnnnnnnnnnnnnnnnnnnnnnnnnnnnnnnnnnnnnnnnnnnnnnnnnnnnnnnnnnnnnnnnnnnnnnnnnnnnnnnnnnnnnnnnnnnnnnnnnnnnnnnnnnnnnnnnnnnnnnnnnnnnnnnnnnnnnnnnnnnnnnnnnnnnnnnnnnnnnnnnnnnnnnnnnnnnnnnnnnnnnnnnnnnnnnnnnnnnnnnnnnnnnnnnnnnnnnnnnnnnnnnnnnnnnnnnnnnnnnnnnnnnnnnnnnnnnnnnnnnnnnnnnnnnnnnnnnnnnnnnnnnnnnnnnnnnnnnnnnnnnnnnnnnnnnnnnnnnnnnnnnnnnnnnnnnnnnnnnnnnnnnnnnnnnnnnnnnnnnnnnnnnnnnnnnnnnnnnnnnnnnnnnnnnnnnnnnnnnnnnnnnnnnnnnnnnnnnnnnnnnnnnnnnnnnnnnnnnnnnnnnnnnnnnnnnnnnnnnnnnnnnnnnnnnnnnnnnnnnnnnnnnnnnnnnnnnnnnnnnnnnnnnnnnnnnnnnnnnnnnnnnnnnnnnnnnnnnnnnnnnnnnnnnnnnnnnnnnnnnnnnnnnnnnnnnnnnnnnnnnnnnnnnnnnnnnnnnnnnnnnnnnnnnnnnnnnnnnnnnnnnnnnnnnnnnnnnnnnnnnnnnnnnnnnnnnnnnnnnnnnnnnnnnnnnnnnnnnnnnnnnnnnnnnnnnnnnnnnnnnnnnnnnnnnnnnnnnnnnnnnnnnnnnnnnnnnnnnnnnnnnnnnnnnnnnnnnnnnnnnnnnnnnnnnnnnnnnnnnnnnnnnnnnnnnnnnnnnnnnnnnnnnnnnnnnnnnnnnnnnnnnnnnnnnnnnnnnnnnnnnnnnnnnnnnnnnnnnnnnnnnnnnnnnnnnnnnnnnnnnnnnnnnnnnnnnnnnnnnnnnnnnnnnnnnnnnnnnnnnnnnnnnnnnnnnnnnnnnnnnnnnnnnnnnnnnnnnnnnnnnnnnnnnnnnnnnnnnnnnnnnnnnnnnnnnnnnnnnnnnnnnnnnnnnnnnnnnnnnnnnnnnnnnnnnnnnnnnnnnnnnnnnnnnnnnnnnnnnnnnnnnnnnnnnnnnnnnnnnnnnnnnnnnnnnnnnnnnnnnnnnnnnnnnnnnnnnnnnnnnnnnnnnnnnnnnnnnnnnnnnnnnnnnnnnnnnnnnnnnnnnnnnnnnnnnnnnnnnnnnnnnnnnnnnnnnnnnnnnnnnnnnnnnnnnnnnnnnnnnnnnnnnnnnnnnnnnnnnnnnnnnnnnnnnnnnnnnnnnnnnnnnnnnnnnnnnnnnnnnnnnnnnnnnnnnnnnnnnnnnnnnnnnnnnnnnnnnnnnnnnnnnnnnnnnnnnnnnnnnnnnnnnnnnnnnnnnnnnnnnnnnnnnnnnnnnnnnnnnnnnnnnnnnnnnnnnnnnnnnnnnnnnnnnnnnnnnnnnnnnnnnnnnnnnnnnnnnnnnnnnnnnnnnnnnnnnnnnnnnnnnnnnnnnnnnnnnnnnnnnnnnnnnnnnnnnnnnnnnnnnnnnnnnnnnnnnnnnnnnnnnnnnnnnnnnnnnnnnnnnnnnnnnnnnnnnnnnnnnnnnnnnnnnnnnnnnnnnnnnnnnnnnnnnnnnnnnnnnnnnnnnnnnnnnnnnnnnnnnnnnnnnnnnnnnnnnnnnnnnnnnnnnnnnnnnnnnnnnnnnnnnnnnnnnnnnnnnnnnnnnnnnnnnnnnnnnnnnnnnnnnnnnnnnnnnnnnnnnnnnnnnnnnnnnnnnnnnnnnnnnnnnnnnnnnnnnnnnnnnnnnnnnnnnnnnnnnnnnnnnnnnnnnnnnnnnnnnnnnnnnnnnnnnnnnnnnnnnnnnnnnnnnnnnnnnnnnnnnnnnnnnnnnnnnnnnnnnnnnnnnnnnnnnnnnnnnnnnnnnnnnnnnnnnnnnnnnnnnnnnnnnnnnnnnnnnnnnnnnnnnnnnnnnnnnnnnnnnnnnnnnnnnnnnnnnnnnnnnnnnnnnnnnnnnnnnnnnnnnnnnnnnnnnnnnnnnnnnnnnnnnnnnnnnnnnnnnnnnnnnnnnnnnnnnnnnnnnnnnnnnnnnnnnnnnnnnnnnnnnnnnnnnnnnnnnnnnnnnnnnnnnnnnnnnnnnnnnnnnnnnnnnnnnnnnnnnnnnnnnnnnnnnnnnnnnnnnnnnnnnnnnnnnnnnnnnnnnnnnnnnnnnnnnnnnnnnnnnnnnnnnnnnnnnnnnnnnnnnnnnnnnnnnnnnnnnnnnnnnnnnnnnnnnnnnnnnnnnnnnnnnnnnnnnnnnnnnnnnnnnnnnnnnnnnnnnnnnnnnnnnnnnnnnnnnnnnnnnnnnnnnnnnnnnnnnnnnnnnnnnnnnnnnnnnnnnnnnnnnnnnnnnnnnnnnnnnnnnnnnnnnnnnnnnnnnnnnnnnnnnnnnnnnnnnnnnnnnnnnnnnnnnnnnnnnnnnnnnnnnnnnnnnnnnnnnnnnnnnnnnnnnnnnnnnnnnnnnnnnnnnnnnnnnnnnnnnnnnnnnnnnnnnnnnnnnnnnnnnnnnnnnnnnnnnnnnnnnnnnnnnnnnnnnnnnnnnnnnnnnnnnnnnnnnnnnnnnnnnnnnnnnnnnnnnnnnnnnnnnnnnnnnnnnnnnnnnnnnnnnnnnnnnnnnnnnnnnnnnnnnnnnnnnnnnnnnnnnnnnnnnnnnnnnnnnnnnnnnnnnnnnnnnnnnnnnnnnnnnnnnnnnnnnnnnnnnnnnnnnnnnnnnnnnnnnnnnnnnnnnnnnnnnnnnnnnnnnnnnnnnnnnnnnnnnnnnnnnnnnnnnnnnnnnnnnnnnnnnnnnnnnnnnnnnnnnnnnnnnnnnnnnnnnnnnnnnnnnnnnnnnnnnnnnnnnnnnnnnnnnnnnnnnnnnnnnnnnnnnnnnnnnnnnnnnnnnnnnnnnnnnnnnnnnnnnnnnnnnnnnnnnnnnnnnnnnnnnnnnnnnnnnnnnnnnnnnnnnnnnnnnnnnnnnnnnnnnnnnnnnnnnnnnnnnnnnnnnnnnnnnnnnnnnnnnnnnnnnnnnnnnnnnnnnnnnnnnnnnnnnnnnnnnnnnnnnnnnnnnnnnnnnnnnnnnnnnnnnnnnnnnnnnnnnnnnnnnnnnnnnnnnnnnnnnnnnnnnnnnnnnnnnnnnnnnnnnnnnnnnnnnnnnnnnnnnnnnnnnnnnnnnnnnnnnnnnnnnnnnnnnnnnnnnnnnnnnnnnnnnnnnnnnnnnnnnnnnnnnnnnnnnnnnnnnnnnnnnnnnnnnnnnnnnnnnnnnnnnnnnnnnnnnnnnnnnnnnnnnnnnnnnnnnnnnnnnnnnnnnnnnnnnnnnnnnnnnnnnnnnnnnnnnnnnnnnnnnnnnnnnnnnnnnnnnnnnnnnnnnnnnnnnnnnnnnnnnnnnnnnnnnnnnnnnnnnnnnnnnnnnnnnnnnnnnnnnnnnnnnnnnnnnnnnnnnnnnnnnnnnnnnnnnnnnnnnnnnnnnnnnnnnnnnnnnnnnnnnnnnnnnnnnnnnnnnnnnnnnnnnnnnnnnnnnnnnnnnnnnnnnnnnnnnnnnnnnnnnnnnnnnnnnnnnnnnnnnnnnnnnnnnnnnnnnnnnnnnnnnnnnnnnnnnnnnnnnnnnnnnnnnnnnnnnnnnnnnnnnnnnnnnnnnnnnnnnnnnnnnnnnnnnnnnnnnnnnnnnnnnnnnnnnnnnnnnnnnnnnnnnnnnnnnnnnnnnnnnnnnnnnnnnnnnnnnnnnnnnnnnnnnnnnnnnnnnnnnnnnnnnnnnnnnnnnnnnnnnnnnnnnnnnnnnnnnnnnnnnnnnnnnnnnnnnnnnnnnnnnnnnnnnnnnnnnnnnnnnnnnnnnnnnnnnnnnnnnnnnnnnnnnnnnnnnnnnnnnnnnnnnnnnnnnnnnnnnnnnnnnnnnnnnnnnnnnnnnnnnnnnnnnnnnnnnnnnnnnnnnnnnnnnnnnnnnnnnnnnnnnnnnnnnnnnnnnnnnnnnnnnnnnnnnnnnnnnnnnnnnnnnnnnnnnnnnnnnnnnnnnnnnnnnnnnnnnnnnnnnnnnnnnnnnnnnnnnnnnnnnnnnnnnnnnnnnnnnnnnnnnnnnnnnnnnnnnnnnnnnnnnnnnnnnnnnnnnnnnnnnnnnnnnnnnnnnnnnnnnnnnnnnnnnnnnnnnnnnnnnnnnnnnnnnnnnnnnnnnnnnnnnnnnnnnnnnnnnnnnnnnnnnnnnnnnnnnnnnnnnnnnnnnnnnnnnnnnnnnnnnnnnnnnnnnnnnnnnnnnnnnnnnnnnnnnnnnnnnnnnnnnnnnnnnnnnnnnnnnnnnnnnnnnnnnnnnnnnnnnnnnnnnnnnnnnnnnnnnnnnnnnnnnnnnnnnnnnnnnnnnnnnnnnnnnnnnnnnnnnnnnnnnnnnnnnnnnnnnnnnnnnnnnnnnnnnnnnnnnnnnnnnnnnnnnnnnnnnnnnnnnnnnnnnnnnnnnnnnnnnnnnnnnnnnnnnnnnnnnnnnnnnnnnnnnnnnnnnnnnnnnnnnnnnnnnnnnnnnnnnnnnnnnnnnnnnnnnnnnnnnnnnnnnnnnnnnnnnnnnnnnnnnnnnnnnnnnnnnnnnnnnnnnnnnnnnnnnnnnnnnnnnnnnnnnnnnnnnnnnnnnnnnnnnnnnnnnnnnnnnnnnnnnnnnnnnnnnnnnnnnnnnnnnnnnnnnnnnnnnnnnnnnnnnnnnnnnnnnnnnnnnnnnnnnnnnnnnnnnnnnnnnnnnnnnnnnnnnnnnnnnnnnnnnnnnnnnnnnnnnnnnnnnnnnnnnnnnnnnnnnnnnnnnnnnnnnnnnnnnnnnnnnnnnnnnnnnnnnnnnnnnnnnnnnnnnnnnnnnnnnnnnnnnnnnnnnnnnnnnnnnnnnnnnnnnnnnnnnnnnnnnnnnnnnnnnnnnnnnnnnnnnnnnnnnnnnnnnnnnnnnnnnnnnnnnnnnnnnnnnnnnnnnnnnnnnnnnnnnnnnnnnnnnnnnnnnnnnnnnnnnnnnnnnnnnnnnnnnnnnnnnnnnnnnnnnnnnnnnnnnnnnnnnnnnnnnnnnnnnnnnnnnnnnnnnnnnnnnnnnnnnnnnnnnnnnnnnnnnnnnnnnnnnnnnnnnnnnnnnnnnnnnnnnnnnnnnnnnnnnnnnnnnnnnnnnnnnnnnnnnnnnnnnnnnnnnnnnnnnnnnnnnnnnnnnnnnnnnnnnnnnnnnnnnnnnnnnnnnnnnnnnnnnnnnnnnnnnnnnnnnnnnnnnnnnnnnnnnnnnnnnnnnnnnnnnnnnnnnnnnnnnnnnnnnnnnnnnnnnnnnnnnnnnnnnnnnnnnnnnnnnnnnnnnnnnnnnnnnnnnnnnnnnnnnnnnnnnnnnnnnnnnnnnnnnnnnnnnnnnnnnnnnnnnnnnnnnnnnnnnnnnnnnnnnnnnnnnnnnnnnnnnnnnnnnnnnnnnnnnnnnnnnnnnnnnnnnnnnnnnnnnnnnnnnnnnnnnnnnnnnnnnnnnnnnnnnnnnnnnnnnnnnnnnnnnnnnnnnnnnnnnnnnnnnnnnnnnnnnnnnnnnnnnnnnnnnnnnnnnnnnnnnnnnnnnnnnnnnnnnnnnnnnnnnnnnnnnnnnnnnnnnnnnnnnnnnnnnnnnnnnnnnnnnnnnnnnnnnnnnnnnnnnnnnnnnnnnnnnnnnnnnnnnnnnnnnnnnnnnnnnnnnnnnnnnnnnnnnnnnnnnnnnnnnnnnnnnnnnnnnnnnnnnnnnnnnnnnnnnnnnnnnnnnnnnnnnnnnnnnnnnnnnnnnnnnnnnnnnnnnnnnnnnnnnnnnnnnnnnnnnnnnnnnnnnnnnnnnnnnnnnnnnnnnnnnnnnnnnnnnnnnnnnnnnnnnnnnnnnnnnnnnnnnnnnnnnnnnnnnnnnnnnnnnnnnnnnnnnnnnnnnnnnnnnnnnnnnnnnnnnnnnnnnnnnnnnnnnnnnnnnnnnnnnnnnnnnnnnnnnnnnnnnnnnnnnnnnnnnnnnnnnnnnnnnnnnnnnnnnnnnnnnnnnnnnnnnnnnnnnnnnnnnnnnnnnnnnnnnnnnnnnnnnnnnnnnnnnnnnnnnnnnnnnnnnnnnnnnnnnnnnnnnnnnnnnnnnnnnnnnnnnnnnnnnnnnnnnnnnnnnnnnnnnnnnnnnnnnnnnnnnnnnnnnnnnnnnnnnnnnnnnnnnnnnnnnnnnnnnnnnnnnnnnnnnnnnnnnnnnnnnnnnnnnnnnnnnnnnnnnnnnnnnnnnnnnnnnnnnnnnnnnnnnnnnnnnnnnnnnnnnnnnnnnnnnnnnnnnnnnnnnnnnnnnnnnnnnnnnnnnnnnnnnnnnnnnnnnnnnnnnnnnnnnnnnnnnnnnnnnnnnnnnnnnnnnnnnnnnnnnnnnnnnnnnnnnnnnnnnnnnnnnnnnnnnnnnnnnnnnnnnnnnnnnnnnnnnnnnnnnnnnnnnnnnnnnnnnnnnnnnnnnnnnnnnnnnnnnnnnnnnnnnnnnnnnnnnnnnnnnnnnnnnnnnnnnnnnnnnnnnnnnnnnnnnnnnnnnnnnnnnnnnnnnnnnnnnnnnnnnnnnnnnnnnnnnnnnnnnnnnnnnnnnnnnnnnnnnnnnnnnnnnnnnnnnnnnnnnnnnnnnnnnnnnnnnnnnnnnnnnnnnnnnnnnnnnnnnnnnnnnnnnnnnnnnnnnnnnnnnnnnnnnnnnnnnnnnnnnnnnnnnnnnnnnnnnnnnnnnnnnnnnnnnnnnnnnnnnnnnnnnnnnnnnnnnnnnnnnnnnnnnnnnnnnnnnnnnnnnnnnnnnnnnnnnnnnnnnnnnnnnnnnnnnnnnnnnnnnnnnnnnnnnnnnnnnnnnnnnnnnnnnnnnnnnnnnnnnnnnnnnnnnnnnnnnnnnnnnnnnnnnnnnnnnnnnnnnnnnnnnnnnnnnnnnnnnnnnnnnnnnnnnnnnnnnnnnnnnnnnnnnnnnnnnnnnnnnnnnnnnnnnnnnnnnnnnnnnnnnnnnnnnnnnnnnnnnnnnnnnnnnnnnnnnnnnnnnnnnnnnnnnnnnnnnnnnnnnnnnnnnnnnnnnnnnnnnnnnnnnnnnnnnnnnnnnnnnnnnnnnnnnnnnnnnnnnnnnnnnnnnnnnnnnnnnnnnnnnnnnnnnnnnnnnnnnnnnnnnnnnnnnnnnnnnnnnnnnnnnnnnnnnnnnnnnnnnnnnnnnnnnnnnnnnnnnnnnnnnnnnnnnnnnnnnnnnnnnnnnnnnnnnnnnnnnnnnnnnnnnnnnnnnnnnnnnnnnnnnnnnnnnnnnnnnnnnnnnnnnnnnnnnnnnnnnnnnnnnnnnnnnnnnnnnnnnnnnnnnnnnnnnnnnnnnnnnnnnnnnnnnnnnnnnnnnnnnnnnnnnnnnnnnnnnnnnnnnnnnnnnnnnnnnnnnnnnnnnnnnnnnnnnnnnnnnnnnnnnnnnnnnnnnnnnnnnnnnnnnnnnnnnnnnnnnnnnnnnnnnnnnnnnnnnnnnnnnnnnnnnnnnnnnnnnnnnnnnnnnnnnnnnnnnnnnnnnnnnnnnnnnnnnnnnnnnnnnnnnnnnnnnnnnnnnnnnnnnnnnnnnnnnnnnnnnnnnnnnnnnnnnnnnnnnnnnnnnnnnnnnnnnnnnnnnnnnnnnnnnnnnnnnnnnnnnnnnnnnnnnnnnnnnnnnnnnnnnnnnnnnnnnnnnnnnnnnnnnnnnnnnnnnnnnnnnnnnnnnnnnnnnnnnnnnnnnnnnnnnnnnnnnnnnnnnnnnnnnnnnnnnnnnnnnnnnnnnnnnnnnnnnnnnnnnnnnnnnnnnnnnnnnnnnnnnnnnnnnnnnnnnnnnnnnnnnnnnnnnnnnnnnnnnnnnnnnnnnnnnnnnnnnnnnnnnnnnnnnnnnnnnnnnnnnnnnnnnnnnnnnnnnnnnnnnnnnnnnnnnnnnnnnnnnnnnnnnnnnnnnnnnnnnnnnnnnnnnnnnnnnnnnnnnnnnnnnnnnnnnnnnnnnnnnnnnnnnnnnnnnnnnnnnnnnnnnnnnnnnnnnnnnnnnnnnnnnnnnnnnnnnnnnnnnnnnnnnnnnnnnnnnnnnnnnnnnnnnnnnnnnnnnnnnnnnnnnnnnnnnnnnnnnnnnnnnnnnnnnnnnnnnnnnnnnnnnnnnnnnnnnnnnnnnnnnnnnnnnnnnnnnnnnnnnnnnnnnnnnnnnnnnnnnnnnnnnnnnnnnnnnnnnnnnnnnnnnnnnnnnnnnnnnnnnnnnnnnnnnnnnnnnnnnnnnnnnnnnnnnnnnnnnnnnnnnnnnnnnnnnnnnnnnnnnnnnnnnnnnnnnnnnnnnnnnnnnnnnnnnnnnnnnnnnnnnnnnnnnnnnnnnnnnnnnnnnnnnnnnnnnnnnnnnnnnnnnnnnnnnnnnnnnnnnnnnnnnnnnnnnnnnnnnnnnnnnnnnnnnnnnnnnnnnnnnnnnnnnnnnnnnnnnnnnnnnnnnnnnnnnnnnnnnnnnnnnnnnnnnnnnnnnnnnnnnnnnnnnnnnnnnnnnnnnnnnnnnnnnnnnnnnnnnnnnnnnnnnnnnnnnnnnnnnnnnnnnnnnnnnnnnnnnnnnnnnnnnnnnnnnnnnnnnnnnnnnnnnnnnnnnnnnnnnnnnnnnnnnnnnnnnnnnnnnnnnnnnnnnnnnnnnnnnnnnnnnnnnnnnnnnnnnnnnnnnnnnnnnnnnnnnnnnnnnnnnnnnnnnnnnnnnnnnnnnnnnnnnnnnnnnnnnnnnnnnnnnnnnnnnnnnnnnnnnnnnnnnnnnnnnnnnnnnnnnnnnnnnnnnnnnnnnnnnnnnnnnnnnnnnnnnnnnnnnnnnnnnnnnnnnnnnnnnnnnnnnnnnnnnnnnnnnnnnnnnnnnnnnnnnnnnnnnnnnnnnnnnnnnnnnnnnnnnnnnnnnnnnnnnnnnnnnnnnnnnnnnnnnnnnnnnnnnnnnnnnnnnnnnnnnnnnnnnnnnnnnnnnnnnnnnnnnnnnnnnnnnnnnnnnnnnnnnnnnnnnnnnnnnnnnnnnnnnnnnnnnnnnnnnnnnnnnnnnnnnnnnnnnnnnnnnnnnnnnnnnnnnnnnnnnnnnnnnnnnnnnnnnnnnnnnnnnnnnnnnnnnnnnnnnnnnnnnnnnnnnnnnnnnnnnnnnnnnnnnnnnnnnnnnnnnnnnnnnnnnnnnnnnnnnnnnnnnnnnnnnnnnnnnnnnnnnnnnnnnnnnnnnnnnnnnnnnnnnnnnnnnnnnnnnnnnnnnnnnnnnnnnnnnnnnnnnnnnnnnnnnnnnnnnnnnnnnnnnnnnnnnnnnnnnnnnnnnnnnnnnnnnnnnnnnnnnnnnnnnnnnnnnnnnnnnnnnnnnnnnnnnnnnnnnnnnnnnnnnnnnnnnnnnnnnnnnnnnnnnnnnnnnnnnnnnnnnnnnnnnnnnnnnnnnnnnnnnnnnnnnnnnnnnnnnnnnnnnnnnnnnnnnnnnnnnnnnnnnnnnnnnnnnnnnnnnnnnnnnnnnnnnnnnnnnnnnnnnnnnnnnnnnnnnnnnnnnnnnnnnnnnnnnnnnnnnnnnnnnnnnnnnnnnnnnnnnnnnnnnnnnnnnnnnnnnnnnnnnnnnnnnnnnnnnnnnnnnnnnnnnnnnnnnnnnnnnnnnnnnnnnnnnnnnnnnnnnnnnnnnnnnnnnnnnnnnnnnnnnnnnnnnnnnnnnnnnnnnnnnnnnnnnnnnnnnnnnnnnnnnnnnnnnnnnnnnnnnnnnnnnnnnnnnnnnnnnnnnnnnnnnnnnnnnnnnnnnnnnnnnnnnnnnnnnnnnnnnnnnnnnnnnnnnnnnnnnnnnnnnnnnnnnnnnnnnnnnnnnnnnnnnnnnnnnnnnnnnnnnnnnnnnnnnnnnnnnnnnnnnnnnnnnnnnnnnnnnnnnnnnnnnnnnnnnnnnnnnnnnnnnnnnnnnnnnnnnnnnnnnnnnnnnnnnnnnnnnnnnnnnnnnnnnnnnnnnnnnnnnnnnnnnnnnnnnnnnnnnnnnnnnnnnnnnnnnnnnnnnnnnnnnnnnnnnnnnnnnnnnnnnnnnnnnnnnnnnnnnnnnnnnnnnnnnnnnnnnnnnnnnnnnnnnnnnnnnnnnnnnnnnnnnnnnnnnnnnnnnnnnnnnnnnnnnnnnnnnnnnnnnnnnnnnnnnnnnnnnnnnnnnnnnnnnnnnnnnnnnnnnnnnnnnnnnnnnnnnnnnnnnnnnnnnnnnnnnnnnnnnnnnnnnnnnnnnnnnnnnnnnnnnnnnnnnnnnnnnnnnnnnnnnnnnnnnnnnnnnnnnnnnnnnnnnnnnnnnnnnnnnnnnnnnnnnnnnnnnnnnnnnnnnnnnnnnnnnnnnnnnnnnnnnnnnnnnnnnnnnnnnnnnnnnnnnnnnnnnnnnnnnnnnnnnnnnnnnnnnnnnnnnnnnnnnnnnnnnnnnnnnnnnnnnnnnnnnnnnnnnnnnnnnnnnnnnnnnnnnnnnnnnnnnnnnnnnnnnnnnnnnnnnnnnnnnnnnnnnnnnnnnnnnnnnnnnnnnnnnnnnnnnnnnnnnnnnnnnnnnnnnnnnnnnnnnnnnnnnnnnnnnnnnnnnnnnnnnnnnnnnnnnnnnnnnnnnnnnnnnnnnnnnnnnnnnnnnnnnnnnnnnnnnnnnnnnnnnnnnnnnnnnnnnnnnnnnnnnnnnnnnnnnnnnnnnnnnnnnnnnnnnnnnnnnnnnnnnnnnnnnnnnnnnnnnnnnnnnnnnnnnnnnnnnnnnnnnnnnnnnnnnnnnnnnnnnnnnnnnnnnnnnnnnnnnnnnnnnnnnnnnnnnnnnnnnnnnnnnnnnnnnnnnnnnnnnnnnnnnnnnnnnnnnnnnnnnnnnnnnnnnnnnnnnnnnnnnnnnnnnnnnnnnnnnnnnnnnnnnnnnnnnnnnnnnnnnnnnnnnnnnnnnnnnnnnnnnnnnnnnnnnnnnnnnnnnnnnnnnnnnnnnnnnnnnnnnnnnnnnnnnnnnnnnnnnnnnnnnnnnnnnnnnnnnnnnnnnnnnnnnnnnnnnnnnnnnnnnnnnnnnnnnnnnnnnnnnnnnnnnnnnnnnnnnnnnnnnnnnnnnnnnnnnnnnnnnnnnnnnnnnnnnnnnnnnnnnnnnnnnnnnnnnnnnnnnnnnnnnnnnnnnnnnnnnnnnnnnnnnnnnnnnnnnnnnnnnnnnnnnnnnnnnnnnnnnnnnnnnnnnnnnnnnnnnnnnnnnnnnnnnnnnnnnnnnnnnnnnnnnnnnnnnnnnnnnnnnnnnnnnnnnnnnnnnnnnnnnnnnnnnnnnnnnnnnnnnnnnnnnnnnnnnnnnnnnnnnnnnnnnnnnnnnnnnnnnnnnnnnnnnnnnnnnnnnnnnnnnnnnnnnnnnnnnnnnnnnnnnnnnnnnnnnnnnnnnnnnnnnnnnnnnnnnnnnnnnnnnnnnnnnnnnnnnnnnnnnnnnnnnnnnnnnnnnnnnnnnnnnnnnnnnnnnnnnnnnnnnnnnnnnnnnnnnnnnnnnnnnnnnnnnnnnnnnnnnnnnnnnnnnnnnnnnnnnnnnnnnnnnnnnnnnnnnnnnnnnnnnnnnnnnnnnnnnnnnnnnnnnnnnnnnnnnnnnnnnnnnnnnnnnnnnnnnnnnnnnnnnnnnnnnnnnnnnnnnnnnnnnnnnnnnnnnnnnnnnnnnnnnnnnnnnnnnnnnnnnnnnnnnnnnnnnnnnnnnnnnnnnnnnnnnnnnnnnnnnnnnnnnnnnnnnnnnnnnnnnnnnnnnnnnnnnnnnnnnnnnnnnnnnnnnnnnnnnnnnnnnnnnnnnnnnnnnnnnnnnnnnnnnnnnnnnnnnnnnnnnnnnnnnnnnnnnnnnnnnnnnnnnnnnnnnnnnnnnnnnnnnnnnnnnnnnnnnnnnnnnnnnnnnnnnnnnnnnnnnnnnnnnnnnnnnnnnnnnnnnnnnnnnnnnnnnnnnnnnnnnnnnnnnnnnnnnnnnnnnnnnnnnnnnnnnnnnnnnnnnnnnnnnnnnnnnnnnnnnnnnnnnnnnnnnnnnnnnnnnnnnnnnnnnnnnnnnnnnnnnnnnnnnnnnnnnnnnnnnnnnnnnnnnnnnnnnnnnnnnnnnnnnnnnnnnnnnnnnnnnnnnnnnnnnnnnnnnnnnnnnnnnnnnnnnnnnnnnnnnnnnnnnnnnnnnnnnnnnnnnnnnnnnnnnnnnnnnnnnnnnnnnnnnnnnnnnnnnnnnnnnnnnnnnnnnnnnnnnnnnnnnnnnnnnnnnnnnnnnnnnnnnnnnnnnnnnnnnnnnnnnnnnnnnnnnnnnnnnnnnnnnnnnnnnnnnnnnnnnnnnnnnnnnnnnnnnnnnnnnnnnnnnnnnnnnnnnnnnnnnnnnnnnnnnnnnnnnnnnnnnnnnnnnnnnnnnnnnnnnnnnnnnnnnnnnnnnnnnnnnnnnnnnnnnnnnnnnnnnnnnnnnnnnnnnnnnnnnnnnnnnnnnnnnnnnnnnnnnnnnnnnnnnnnnnnnnnnnnnnnnnnnnnnnnnnnnnnnnnnnnnnnnnnnnnnnnnnnnnnnnnnnnnnnnnnnnnnnnnnnnnnnnnnnnnnnnnnnnnnnnnnnnnnnnnnnnnnnnnnnnnnnnnnnnnnnnnnnnnnnnnnnnnnnnnnnnnnnnnnnnnnnnnnnnnnnnnnnnnnnnnnnnnnnnnnnnnnnnnnnnnnnnnnnnnnnnnnnnnnnnnnnnnnnnnnnnnnnnnnnnnnnnnnnnnnnnnnnnnnnnnnnnnnnnnnnnnnnnnnnnnnnnnnnnnnnnnnnnnnnnnnnnnnnnnnnnnnnnnnnnnnnnnnnnnnnnnnnnnnnnnnnnnnnnnnnnnnnnnnnnnnnnnnnnnnnnnnnnnnnnnnnnnnnnnnnnnnnnnnnnnnnnnnnnnnnnnnnnnnnnnnnnnnnnnnnnnnnnnnnnnnnnnnnnnnnnnnnnnnnnnnnnnnnnnnnnnnnnnnnnnnnnnnnnnnnnnnnnnnnnnnnnnnnnnnnnnnnnnnnnnnnnnnnnnnnnnnnnnnnnnnnnnnnnnnnnnnnnnnnnnnnnnnnnnnnnnnnnnnnnnnnnnnnnnnnnnnnnnnnnnnnnnnnnnnnnnnnnnnnnnnnnnnnnnnnnnnnnnnnnnnnnnnnnnnnnnnnnnnnnnnnnnnnnnnnnnnnnnnnnnnnnnnnnnnnnnnnnnnnnnnnnnnnnnnnnnnnnnnnnnnnnnnnnnnnnnnnnnnnnnnnnnnnnnnnnnnnnnnnnnnnnnnnnnnnnnnnnnnnnnnnnnnnnnnnnnnnnnnnnnnnnnnnnnnnnnnnnnnnnnnnnnnnnnnnnnnnnnnnnnnnnnnnnnnnnnnnnnnnnnnnnnnnnnnnnnnnnnnnnnnnnnnnnnnnnnnnnnnnnnnnnnnnnnnnnnnnnnnnnnnnnnnnnnnnnnnnnnnnnnnnnnnnnnnnnnnnnnnnnnnnnnnnnnnnnnnnnnnnnnnnnnnnnnnnnnnnnnnnnnnnnnnnnnnnnnnnnnnnnnnnnnnnnnnnnnnnnnnnnnnnnnnnnnnnnnnnnnnnnnnnnnnnnnnnnnnnnnnnnnnnnnnnnnnnnnnnnnnnnnnnnnnnnnnnnnnnnnnnnnnnnnnnnnnnnnnnnnnnnnnnnnnnnnnnnnnnnnnnnnnnnnnnnnnnnnnnnnnnnnnnnnnnnnnnnnnnnnnnnnnnnnnnnnnnnnnnnnnnnnnnnnnnnnnnnnnnnnnnnnnnnnnnnnnnnnnnnnnnnnnnnnnnnnnnnnnnnnnnnnnnnnnnnnnnnnnnnnnnnnnnnnnnnnnnnnnnnnnnnnnnnnnnnnnnnnnnnnnnnnnnnnnnnnnnnnnnnnnnnnnnnnnnnnnnnnnnnnnnnnnnnnnnnnnnnnnnnnnnnnnnnnnnnnnnnnnnnnnnnnnnnnnnnnnnnnnnnnnnnnnnnnnnnnnnnnnnnnnnnnnnnnnnnnnnnnnnnnnnnnnnnnnnnnnnnnnnnnnnnnnnnnnnnnnnnnnnnnnnnnnnnnnnnnnnnnnnnnnnnnnnnnnnnnnnnnnnnnnnnnnnnnnnnnnnnnnnnnnnnnnnnnnnnnnnnnnnnnnnnnnnnnnnnnnnnnnnnnnnnnnnnnnnnnnnnnnnnnnnnnnnnnnnnnnnnnnnnnnnnnnnnnnnnnnnnnnnnnnnnnnnnnnnnnnnnnnnnnnnnnnnnnnnnnnnnnnnnnnnnnnnnnnnnnnnnnnnnnnnnnnnnnnnnnnnnnnnnnnnnnnnnnnnnnnnnnnnnnnnnnnnnnnnnnnnnnnnnnnnnnnnnnnnnnnnnnnnnnnnnnnnnnnnnnnnnnnnnnnnnnnnnnnnnnnnnnnnnnnnnnnnnnnnnnnnnnnnnnnnnnnnnnnnnnnnnnnnnnnnnnnnnnnnnnnnnnnnnnnnnnnnnnnnnnnnnnnnnnnnnnnnnnnnnnnnnnnnnnnnnnnnnnnnnnnnnnnnnnnnnnnnnnnnnnnnnnnnnnnnnnnnnnnnnnnnnnnnnnnnnnnnnnnnnnnnnnnnnnnnnnnnnnnnnnnnnnnnnnnnnnnnnnnnnnnnnnnnnnnnnnnnnnnnnnnnnnnnnnnnnnnnnnnnnnnnnnnnnnnnnnnnnnnnnnnnnnnnnnnnnnnnnnnnnnnnnnnnnnnnnnnnnnnnnnnnnnnnnnnnnnnnnnnnnnnnnnnnnnnnnnnnnnnnnnnnnnnnnnnnnnnnnnnnnnnnnnnnnnnnnnnnnnnnnnnnnnnnnnnnnnnnnnnnnnnnnnnnnnnnnnnnnnnnnnnnnnnnnnnnnnnnnnnnnnnnnnnnnnnnnnnnnnnnnnnnnnnnnnnnnnnnnnnnnnnnnnnnnnnnnnnnnnnnnnnnnnnnnnnnnnnnnnnnnnnnnnnnnnnnnnnnnnnnnnnnnnnnnnnnnnnnnnnnnnnnnnnnnnnnnnnnnnnnnnnnnnnnnnnnnnnnnnnnnnnnnnnnnnnnnnnnnnnnnnnnnnnnnnnnnnnnnnnnnnnnnnnnnnnnnnnnnnnnnnnnnnnnnnnnnnnnnnnnnnnnnnnnnnnnnnnnnnnnnnnnnnnnnnnnnnnnnnnnnnnnnnnnnnnnnnnnnnnnnnnnnnnnnnnnnnnnnnnnnnnnnnnnnnnnnnnnnnnnnnnnnnnnnnnnnnnnnnnnnnnnnnnnnnnnnnnnnnnnnnnnnnnnnnnnnnnnnnnnnnnnnnnnnnnnnnnnnnnnnnnnnnnnnnnnnnnnnnnnnnnnnnnnnnnnnnnnnnnnnnnnnnnnnnnnnnnnnnnnnnnnnnnnnnnnnnnnnnnnnnnnnnnnnnnnnnnnnnnnnnnnnnnnnnnnnnnnnnnnnnnnnnnnnnnnnnnnnnnnnnnnnnnnnnnnnnnnnnnnnnnnnnnnnnnnnnnnnnnnnnnnnnnnnnnnnnnnnnnnnnnnnnnnnnnnnnnnnnnnnnnnnnnnnnnnnnnnnnnnnnnnnnnnnnnnnnnnnnnnnnnnnnnnnnnnnnnnnnnnnnnnnnnnnnnnnnnnnnnnnnnnnnnnnnnnnnnnnnnnnnnnnnnnnnnnnnnnnnnnnnnnnnnnnnnnnnnnnnnnnnnnnnnnnnnnnnnnnnnnnnnnnnnnnnnnnnnnnnnnnnnnnnnnnnnnnnnnnnnnnnnnnnnnnnnnnnnnnnnnnnnnnnnnnnnnnnnnnnnnnnnnnnnnnnnnnnnnnnnnnnnnnnnnnnnnnnnnnnnnnnnnnnnnnnnnnnnnnnnnnnnnnnnnnnnnnnnnnnnnnnnnnnnnnnnnnnnnnnnnnnnnnnnnnnnnnnnnnnnnnnnnnnnnnnnnnnnnnnnnnnnnnnnnnnnnnnnnnnnnnnnnnnnnnnnnnnnnnnnnnnnnnnnnnnnnnnnnnnnnnnnnnnnnnnnnnnnnnnnnnnnnnnnnnnnnnnnnnnnnnnnnnnnnnnnnnnnnnnnnnnnnnnnnnnnnnnnnnnnnnnnnnnnnnnnnnnnnnnnnnnnnnnnnnnnnnnnnnnnnnnnnnnnnnnnnnnnnnnnnnnnnnnnnnnnnnnnnnnnnnnnnnnnnnnnnnnnnnnnnnnnnnnnnnnnnnnnnnnnnnnnnnnnnnnnnnnnnnnnnnnnnnnnnnnnnnnnnnnnnnnnnnnnnnnnnnnnnnnnnnnnnnnnnnnnnnnnnnnnnnnnnnnnnnnnnnnnnnnnnnnnnnnnnnnnnnnnnnnnnnnnnnnnnnnnnnnnnnnnnnnnnnnnnnnnnnnnnnnnnnnnnnnnnnnnnnnnnnnnnnnnnnnnnnnnnnnnnnnnnnnnnnnnnnnnnnnnnnnnnnnnnnnnnnnnnnnnnnnnnnnnnnnnnnnnnnnnnnnnnnnnnnnnnnnnnnnnnnnnnnnnnnnnnnnnnnnnnnnnnnnnnnnnnnnnnnnnnnnnnnnnnnnnnnnnnnnnnnnnnnnnnnnnnnnnnnnnnnnnnnnnnnnnnnnnnnnnnnnnnnnnnnnnnnnnnnnnnnnnnnnnnnnnnnnnnnnnnnnnnnnnnnnnnnnnnnnnnnnnnnnnnnnnnnnnnnnnnnnnnnnnnnnnnnnnnnnnnnnnnnnnnnnnnnnnnnnnnnnnnnnnnnnnnnnnnnnnnnnnnnnnnnnnnnnnnnnnnnnnnnnnnnnnnnnnnnnnnnnnnnnnnnnnnnnnnnnnnnnnnnnnnnnnnnnnnnnnnnnnnnnnnnnnnnnnnnnnnnnnnnnnnnnnnnnnnnnnnnnnnnnnnnnnnnnnnnnnnnnnnnnnnnnnnnnnnnnnnnnnnnnnnnnnnnnnnnnnnnnnnnnnnnnnnnnnnnnnnnnnnnnnnnnnnnnnnnnnnnnnnnnnnnnnnnnnnnnnnnnnnnnnnnnnnnnnnnnnnnnnnnnnnnnnnnnnnnnnnnnnnnnnnnnnnnnnnnnnnnnnnnnnnnnnnnnnnnnnnnnnnnnnnnnnnnnnnnnnnnnnnnnnnnnnnnnnnnnnnnnnnnnnnnnnnnnnnnnnnnnnnnnnnnnnnnnnnnnnnnnnnnnnnnnnnnnnnnnnnnnnnnnnnnnnnnnnnnnnnnnnnnnnnnnnnnnnnnnnnnnnnnnnnnnnnnnnnnnnnnnnnnnnnnnnnnnnnnnnnnnnnnnnnnnnnnnnnnnnnnnnnnnnnnnnnnnnnnnnnnnnnnnnnnnnnnnnnnnnnnnnnnnnnnnnnnnnnnnnnnnnnnnnnnnnnnnnnnnnnnnnnnnnnnnnnnnnnnnnnnnnnnnnnnnnnnnnnnnnnnnnnnnnnnnnnnnnnnnnnnnnnnnnnnnnnnnnnnnnnnnnnnnnnnnnnnnnnnnnnnnnnnnnnnnnnnnnnnnnnnnnnnnnnnnnnnnnnnnnnnnnnnnnnnnnnnnnnnnnnnnnnnnnnnnnnnnnnnnnnnnnnnnnnnnnnnnnnnnnnnnnnnnnnnnnnnnnnnnnnnnnnnnnnnnnnnnnnnnnnnnnnnnnnnnnnnnnnnnnnnnnnnnnnnnnnnnnnnnnnnnnnnnnnnnnnnnnnnnnnnnnnnnnnnnnnnnnnnnnnnnnnnnnnnnnnnnnnnnnnnnnnnnnnnnnnnnnnnnnnnnnnnnnnnnnnnnnnnnnnnnnnnnnnnnnnnnnnnnnnnnnnnnnnnnnnnnnnnnnnnnnnnnnnnnnnnnnnnnnnnnnnnnnnnnnnnnnnnnnnnnnnnnnnnnnnnnnnnnnnnnnnnnnnnnnnnnnnnnnnnnnnnnnnnnnnnnnnnnnnnnnnnnnnnnnnnnnnnnnnnnnnnnnnnnnnnnnnnnnnnnnnnnnnnnnnnnnnnnnnnnnnnnnnnnnnnnnnnnnnnnnnnnnnnnnnnnnnnnnnnnnnnnnnnnnnnnnnnnnnnnnnnnnnnnnnnnnnnnnnnnnnnnnnnnnnnnnnnnnnnnnnnnnnnnnnnnnnnnnnnnnnnnnnnnnnnnnnnnnnnnnnnnnnnnnnnnnnnnnnnnnnnnnnnnnnnnnnnnnnnnnnnnnnnnnnnnnnnnnnnnnnnnnnnnnnnnnnnnnnnnnnnnnnnnnnnnnnnnnnnnnnnnnnnnnnnnnnnnnnnnnnnnnnnnnnnnnnnnnnnnnnnnnnnnnnnnnnnnnnnnnnnnnnnnnnnnnnnnnnnnnnnnnnnnnnnnnnnnnnnnnnnnnnnnnnnnnnnnnnnnnnnnnnnnnnnnnnnnnnnnnnnnnnnnnnnnnnnnnnnnnnnnnnnnnnnnnnnnnnnnnnnnnnnnnnnnnnnnnnnnnnnnnnnnnnnnnnnnnnnnnnnnnnnnnnnnnnnnnnnnnnnnnnnnnnnnnnnnnnnnnnnnnnnnnnnnnnnnnnnnnnnnnnnnnnnnnnnnnnnnnnnnnnnnnnnnnnnnnnnnnnnnnnnnnnnnnnnnnnnnnnnnnnnnnnnnnnnnnnnnnnnnnnnnnnnnnnnnnnnnnnnnnnnnnnnnnnnnnnnnnnnnnnnnnnnnnnnnnnnnnnnnnnnnnnnnnnnnnnnnnnnnnnnnnnnnnnnnnnnnnnnnnnnnnnnnnnnnnnnnnnnnnnnnnnnnnnnnnnnnnnnnnnnnnnnnnnnnnnnnnnnnnnnnnnnnnnnnnnnnnnnnnnnnnnnnnnnnnnnnnnnnnnnnnnnnnnnnnnnnnnnnnnnnnnnnnnnnnnnnnnnnnnnnnnnnnnnnnnnnnnnnnnnnnnnnnnnnnnnnnnnnnnnnnnnnnnnnnnnnnnnnnnnnnnnnnnnnnnnnnnnnnnnnnnnnnnnnnnnnnnnnnnnnnnnnnnnnnnnnnnnnnnnnnnnnnnnnnnnnnnnnnnnnnnnnnnnnnnnnnnnnnnnnnnnnnnnnnnnnnnnnnnnnnnnnnnnnnnnnnnnnnnnnnnnnnnnnnnnnnnnnnnnnnnnnnnnnnnnnnnnnnnnnnnnnnnnnnnnnnnnnnnnnnnnnnnnnnnnnnnnnnnnnnnnnnnnnnnnnnnnnnnnnnnnnnnnnnnnnnnnnnnnnnnnnnnnnnnnnnnnnnnnnnnnnnnnnnnnnnnnnnnnnnnnnnnnnnnnnnnnnnnnnnnnnnnnnnnnnnnnnnnnnnnnnnnnnnnnnnnnnnnnnnnnnnnnnnnnnnnnnnnnnnnnnnnnnnnnnnnnnnnnnnnnnnnnnnnnnnnnnnnnnnnnnnnnnnnnnnnnnnnnnnnnnnnnnnnnnnnnnnnnnnnnnnnnnnnnnnnnnnnnnnnnnnnnnnnnnnnnnnnnnnnnnnnnnnnnnnnnnnnnnnnnnnnnnnnnnnnnnnnnnnnnnnnnnnnnnnnnnnnnnnnnnnnnnnnnnnnnnnnnnnnnnnnnnnnnnnnnnnnnnnnnnnnnnnnnnnnnnnnnnnnnnnnnnnnnnnnnnnnnnnnnnnnnnnnnnnnnnnnnnnnnnnnnnnnnnnnnnnnnnnnnnnnnnnnnnnnnnnnnnnnnnnnnnnnnnnnnnnnnnnnnnnnnnnnnnnnnnnnnnnnnnnnnnnnnnnnnnnnnnnnnnnnnnnnnnnnnnnnnnnnnnnnnnnnnnnnnnnnnnnnnnnnnnnnnnnnnnnnnnnnnnnnnnnnnnnnnnnnnnnnnnnnnnnnnnnnnnnnnnnnnnnnnnnnnnnnnnnnnnnnnnnnnnnnnnnnnnnnnnnnnnnnnnnnnnnnnnnnnnnnnnnnnnnnnnnnnnnnnnnnnnnnnnnnnnnnnnnnnnnnnnnnnnnnnnnnnnnnnnnnnnnnnnnnnnnnnnnnnnnnnnnnnnnnnnnnnnnnnnnnnnnnnnnnnnnnnnnnnnnnnnnnnnnnnnnnnnnnnnnnnnnnnnnnnnnnnnnnnnnnnnnnnnnnnnnnnnnnnnnnnnnnnnnnnnnnnnnnnnnnnnnnnnnnnnnnnnnnnnnnnnnnnnnnnnnnnnnnnnnnnnnnnnnnnnnnnnnnnnnnnnnnnnnnnnnnnnnnnnnnnnnnnnnnnnnnnnnnnnnnnnnnnnnnnnnnnnnnnnnnnnnnnnnnnnnnnnnnnnnnnnnnnnnnnnnnnnnnnnnnnnnnnnnnnnnnnnnnnnnnnnnnnnnnnnnnnnnnnnnnnnnnnnnnnnnnnnnnnnnnnnnnnnnnnnnnnnnnnnnnnnnnnnnnnnnnnnnnnnnnnnnnnnnnnnnnnnnnnnnnnnnnnnnnnnnnnnnnnnnnnnnnnnnnnnnnnnnnnnnnnnnnnnnnnnnnnnnnnnnnnnnnnnnnnnnnnnnnnnnnnnnnnnnnnnnnnnnnnnnnnnnnnnnnnnnnnnnnnnnnnnnnnnnnnnnnnnnnnnnnnnnnnnnnnnnnnnnnnnnnnnnnnnnnnnnnnnnnnnnnnnnnnnnnnnnnnnnnnnnnnnnnnnnnnnnnnnnnnnnnnnnnnnnnnnnnnnnnnnnnnnnnnnnnnnnnnnnnnnnnnnnnnnnnnnnnnnnnnnnnnnnnnnnnnnnnnnnnnnnnnnnnnnnnnnnnnnnnnnnnnnnnnnnnnnnnnnnnnnnnnnnnnnnnnnnnnnnnnnnnnnnnnnnnnnnnnnnnnnnnnnnnnnnnnnnnnnnnnnnnnnnnnnnnnnnnnnnnnnnnnnnnnnnnnnnnnnnnnnnnnnnnnnnnnnnnnnnnnnnnnnnnnnnnnnnnnnnnnnnnnnnnnnnnnnnnnnnnnnnnnnnnnnnnnnnnnnnnnnnnnnnnnnnnnnnnnnnnnnnnnnnnnnnnnnnnnnnnnnnnnnnnnnnnnnnnnnnnnnnnnnnnnnnnnnnnnnnnnnnnnnnnnnnnnnnnnnnnnnnnnnnnnnnnnnnnnnnnnnnnnnnnnnnnnnnnnnnnnnnnnnnnnnnnnnnnnnnnnnnnnnnnnnnnnnnnnnnnnnnnnnnnnnnnnnnnnnnnnnnnnnnnnnnnnnnnnnnnnnnnnnnnnnnnnnnnnnnnnnnnnnnnnnnnnnnnnnnnnnnnnnnnnnnnnnnnnnnnnnnnnnnnnnnnnnnnnnnnnnnnnnnnnnnnnnnnnnnnnnnnnnnnnnnnnnnnnnnnnnnnnnnnnnnnnnnnnnnnnnnnnnnnnnnnnnnnnnnnnnnnnnnnnnnnnnnnnnnnnnnnnnnnnnnnnnnnnnnnnnnnnnnnnnnnnnnnnnnnnnnnnnnnnnnnnnnnnnnnnnnnnnnnnnnnnnnnnnnnnnnnnnnnnnnnnnnnnnnnnnnnnnnnnnnnnnnnnnnnnnnnnnnnnnnnnnnnnnnnnnnnnnnnnnnnnnnnnnnnnnnnnnnnnnnnnnnnnnnnnnnnnnnnnnnnnnnnnnnnnnnnnnnnnnnnnnnnnnnnnnnnnnnnnnnnnnnnnnnnnnnnnnnnnnnnnnnnnnnnnnnnnnnnnnnnnnnnnnnnnnnnnnnnnnnnnnnnnnnnnnnnnnnnnnnnnnnnnnnnnnnnnnnnnnnnnnnnnnnnnnnnnnnnnnnnnnnnnnnnnnnnnnnnnnnnnnnnnnnnnnnnnnnnnnnnnnnnnnnnnnnnnnnnnnnnnnnnnnnnnnnnnnnnnnnnnnnnnnnnnnnnnnnnnnnnnnnnnnnnnnnnnnnnnnnnnnnnnnnnnnnnnnnnnnnnnnnnnnnnnnnnnnnnnnnnnnnnnnnnnnnnnnnnnnnnnnnnnnnnnnnnnnnnnnnnnnnnnnnnnnnnnnnnnnnnnnnnnnnnnnnnnnnnnnnnnnnnnnnnnnnnnnnnnnnnnnnnnnnnnnnnnnnnnnnnnnnnnnnnnnnnnnnnnnnnnnnnnnnnnnnnnnnnnnnnnnnnnnnnnnnnnnnnnnnnnnnnnnnnnnnnnnnnnnnnnnnnnnnnnnnnnnnnnnnnnnnnnnnnnnnnnnnnnnnnnnnnnnnnnnnnnnnnnnnnnnnnnnnnnnnnnnnnnnnnnnnnnnnnnnnnnnnnnnnnnnnnnnnnnnnnnnnnnnnnnnnnnnnnnnnnnnnnnnnnnnnnnnnnnnnnnnnnnnnnnnnnnnnnnnnnnnnnnnnnnnnnnnnnnnnnnnnnnnnnnnnnnnnnnnnnnnnnnnnnnnnnnnnnnnnnnnnnnnnnnnnnnnnnnnnnnnnnnnnnnnnnnnnnnnnnnnnnnnnnnnnnnnnnnnnnnnnnnnnnnnnnnnnnnnnnnnnnnnnnnnnnnnnnnnnnnnnnnnnnnnnnnnnnnnnnnnnnnnnnnnnnnnnnnnnnnnnnnnnnnnnnnnnnnnnnnnnnnnnnnnnnnnnnnnnnnnnnnnnnnnnnnnnnnnnnnnnnnnnnnnnnnnnnnnnnnnnnnnnnnnnnnnnnnnnnnnnnnnnnnnnnnnnnnnnnnnnnnnnnnnnnnnnnnnnnnnnnnnnnnnnnnnnnnnnnnnnnnnnnnnnnnnnnnnnnnnnnnnnnnnnnnnnnnnnnnnnnnnnnnnnnnnnnnnnnnnnnnnnnnnnnnnnnnnnnnnnnnnnnnnnnnnnnnnnnnnnnnnnnnnnnnnnnnnnnnnnnnnnnnnnnnnnnnnnnnnnnnnnnnnnnnnnnnnnnnnnnnnnnnnnnnnnnnnnnnnnnnnnnnnnnnnnnnnnnnnnnnnnnnnnnnnnnnnnnnnnnnnnnnnnnnnnnnnnnnnnnnnnnnnnnnnnnnnnnnnnnnnnnnnnnnnnnnnnnnnnnnnnnnnnnnnnnnnnnnnnnnnnnnnnnnnnnnnnnnnnnnnnnnnnnnnnnnnnnnnnnnnnnnnnnnnnnnnnnnnnnnnnnnnnnnnnnnnnnnnnnnnnnnnnnnnnnnnnnnnnnnnnnnnnnnnnnnnnnnnnnnnnnnnnnnnnnnnnnnnnnnnnnnnnnnnnnnnnnnnnnnnnnnnnnnnnnnnnnnnnnnnnnnnnnnnnnnnnnnnnnnnnnnnnnnnnnnnnnnnnnnnnnnnnnnnnnnnnnnnnnnnnnnnnnnnnnnnnnnnnnnnnnnnnnnnnnnnnnnnnnnnnnnnnnnnnnnnnnnnnnnnnnnnnnnnnnnnnnnnnnnnnnnnnnnnnnnnnnnnnnnnnnnnnnnnnnnnnnnnnnnnnnnnnnnnnnnnnnnnnnnnnnnnnnnnnnnnnnnnnnnnnnnnnnnnnnnnnnnnnnnnnnnnnnnnnnnnnnnnnnnnnnnnnnnnnnnnnnnnnnnnnnnnnnnnnnnnnnnnnnnnnnnnnnnnnnnnnnnnnnnnnnnnnnnnnnnnnnnnnnnnnnnnnnnnnnnnnnnnnnnnnnnnnnnnnnnnnnnnnnnnnnnnnnnnnnnnnnnnnnnnnnnnnnnnnnnnnnnnnnnnnnnnnnnnnnnnnnnnnnnnnnnnnnnnnnnnnnnnnnnnnnnnnnnnnnnnnnnnnnnnnnnnnnnnnnnnnnnnnnnnnnnnnnnnnnnnnnnnnnnnnnnnnnnnnnnnnnnnnnnnnnnnnnnnnnnnnnnnnnnnnnnnnnnnnnnnnnnnnnnnnnnnnnnnnnnnnnnnnnnnnnnnnnnnnnnnnnnnnnnnnnnnnnnnnnnnnnnnnnnnnnnnnnnnnnnnnnnnnnnnnnnnnnnnnnnnnnnnnnnnnnnnnnnnnnnnnnnnnnnnnnnnnnnnnnnnnnnnnnnnnnnnnnnnnnnnnnnnnnnnnnnnnnnnnnnnnnnnnnnnnnnnnnnnnnnnnnnnnnnnnnnnnnnnnnnnnnnnnnnnnnnnnnnnnnnnnnnnnnnnnnnnnnnnnnnnnnnnnnnnnnnnnnnnnnnnnnnnnnnnnnnnnnnnnnnnnnnnnnnnnnnnnnnnnnnnnnnnnnnnnnnnnnnnnnnnnnnnnnnnnnnnnnnnnnnnnnnnnnnnnnnnnnnnnnnnnnnnnnnnnnnnnnnnnnnnnnnnnnnnnnnnnnnnnnnnnnnnnnnnnnnnnnnnnnnnnnnnnnnnnnnnnnnnnnnnnnnnnnnnnnnnnnnnnnnnnnnnnnnnnnnnnnnnnnnnnnnnnnnnnnnnnnnnnnnnnnnnnnnnnnnnnnnnnnnnnnnnnnnnnnnnnnnnnnnnnnnnnnnnnnnnnnnnnnnnnnnnnnnnnnnnnnnnnnnnnnnnnnnnnnnnnnnnnnnnnnnnnnnnnnnnnnnnnnnnnnnnnnnnnnnnnnnnnnnnnnnnnnnnnnnnnnnnnnnnnnnnnnnnnnnnnnnnnnnnnnnnnnnnnnnnnnnnnnnnnnnnnnnnnnnnnnnnnnnnnnnnnnnnnnnnnnnnnnnnnnnnnnnnnnnnnnnnnnnnnnnnnnnnnnnnnnnnnnnnnnnnnnnnnnnnnnnnnnnnnnnnnnnnnnnnnnnnnnnnnnnnnnnnnnnnnnnnnnnnnnnnnnnnnnnnnnnnnnnnnnnnnnnnnnnnnnnnnnnnnnnnnnnnnnnnnnnnnnnnnnnnnnnnnnnnnnnnnnnnnnnnnnnnnnnnnnnnnnnnnnnnnnnnnnnnnnnnnnnnnnnnnnnnnnnnnnnnnnnnnnnnnnnnnnnnnnnnnnnnnnnnnnnnnnnnnnnnnnnnnnnnnnnnnnnnnnnnnnnnnnnnnnnnnnnnnnnnnnnnnnnnnnnnnnnnnnnnnnnnnnnnnnnnnnnnnnnnnnnnnnnnnnnnnnnnnnnnnnnnnnnnnnnnnnnnnnnnnnnnnnnnnnnnnnnnnnnnnnnnnnnnnnnnnnnnnnnnnnnnnnnnnnnnnnnnnnnnnnnnnnnnnnnnnnnnnnnnnnnnnnnnnnnnnnnnnnnnnnnnnnnnnnnnnnnnnnnnnnnnnnnnnnnnnnnnnnnnnnnnnnnnnnnnnnnnnnnnnnnnnnnnnnnnnnnnnnnnnnnnnnnnnnnnnnnnnnnnnnnnnnnnnnnnnnnnnnnnnnnnnnnnnnnnnnnnnnnnnnnnnnnnnnnnnnnnnnnnnnnnnnnnnnnnnnnnnnnnnnnnnnnnnnnnnnnnnnnnnnnnnnnnnnnnnnnnnnnnnnnnnnnnnnnnnnnnnnnnnnnnnnnnnnnnnnnnnnnnnnnnnnnnnnnnnnnnnnnnnnnnnnnnnnnnnnnnnnnnnnnnnnnnnnnnnnnnnnnnnnnnnnnnnnnnnnnnnnnnnnnnnnnnnnnnnnnnnnnnnnnnnnnnnnnnnnnnnnnnnnnnnnnnnnnnnnnnnnnnnnnnnnnnnnnnnnnnnnnnnnnnnnnnnnnnnnnnnnnnnnnnnnnnnnnnnnnnnnnnnnnnnnnnnnnnnnnnnnnnnnnnnnnnnnnnnnnnnnnnnnnnnnnnnnnnnnnnnnnnnnnnnnnnnnnnnnnnnnnnnnnnnnnnnnnnnnnnnnnnnnnnnnnnnnnnnnnnnnnnnnnnnnnnnnnnnnnnnnnnnnnnnnnnnnnnnnnnnnnnnnnnnnnnnnnnnnnnnnnnnnnnnnnnnnnnnnnnnnnnnnnnnnnnnnnnnnnnnnnnnnnnnnnnnnnnnnnnnnnnnnnnnnnnnnnnnnnnnnnnnnnnnnnnnnnnnnnnnnnnnnnnnnnnnnnnnnnnnnnnnnnnnnnnnnnnnnnnnnnnnnnnnnnnnnnnnnnnnnnnnnnnnnnnnnnnnnnnnnnnnnnnnnnnnnnnnnnnnnnnnnnnnnnnnnnnnnnnnnnnnnnnnnnnnnnnnnnnnnnnnnnnnnnnnnnnnnnnnnnnnnnnnnnnnnnnnnnnnnnnnnnnnnnnnnnnnnnnnnnnnnnnnnnnnnnnnnnnnnnnnnnnnnnnnnnnnnnnnnnnnnnnnnnnnnnnnnnnnnnnnnnnnnnnnnnnnnnnnnnnnnnnnnnnnnnnnnnnnnnnnnnnnnnnnnnnnnnnnnnnnnnnnnnnnnnnnnnnnnnnnnnnnnnnnnnnnnnnnnnnnnnnnnnnnnnnnnnnnnnnnnnnnnnnnnnnnnnnnnnnnnnnnnnnnnnnnnnnnnnnnnnnnnnnnnnnnnnnnnnnnnnnnnnnnnnnnnnnnnnnnnnnnnnnnnnnnnnnnnnnnnnnnnnnnnnnnnnnnnnnnnnnnnnnnnnnnnnnnnnnnnnnnnnnnnnnnnnnnnnnnnnnnnnnnnnnnnnnnnnnnnnnnnnnnnnnnnnnnnnnnnnnnnnnnnnnnnnnnnnnnnnnnnnnnnnnnnnnnnnnnnnnnnnnnnnnnnnnnnnnnnnnnnnnnnnnnnnnnnnnnnnnnnnnnnnnnnnnnnnnnnnnnnnnnnnnnnnnnnnnnnnnnnnnnnnnnnnnnnnnnnnnnnnnnnnnnnnnnnnnnnnnnnnnnnnnnnnnnnnnnnnnnnnnnnnnnnnnnnnnnnnnnnnnnnnnnnnnnnnnnnnnnnnnnnnnnnnnnnnnnnnnnnnnnnnnnnnnnnnnnnnnnnnnnnnnnnnnnnnnnnnnnnnnnnnnnnnnnnnnnnnnnnnnnnnnnnnnnnnnnnnnnnnnnnnnnnnnnnnnnnnnnnnnnnnnnnnnnnnnnnnnnnnnnnnnnnnnnnnnnnnnnnnnnnnnnnnnnnnnnnnnnnnnnnnnnnnnnnnnnnnnnnnnnnnnnnnnnnnnnnnnnnnnnnnnnnnnnnnnnnnnnnnnnnnnnnnnnnnnnnnnnnnnnnnnnnnnnnnnnnnnnnnnnnnnnnnnnnnnnnnnnnnnnnnnnnnnnnnnnnnnnnnnnnnnnnnnnnnnnnnnnnnnnnnnnnnnnnnnnnnnnnnnnnnnnnnnnnnnnnnnnnnnnnnnnnnnnnnnnnnnnnnnnnnnnnnnnnnnnnnnnnnnnnnnnnnnnnnnnnnnnnnnnnnnnnnnnnnnnnnnnnnnnnnnnnnnnnnnnnnnnnnnnnnnnnnnnnnnnnnnnnnnnnnnnnnnnnnnnnnnnnnnnnnnnnnnnnnnnnnnnnnnnnnnnnnnnnnnnnnnnnnnnnnnnnnnnnnnnnnnnnnnnnnnnnnnnnnnnnnnnnnnnnnnnnnnnnnnnnnnnnnnnnnnnnnnnnnnnnnnnnnnnnnnnnnnnnnnnnnnnnnnnnnnnnnnnnnnnnnnnnnnnnnnnnnnnnnnnnnnnnnnnnnnnnnnnnnnnnnnnnnnnnnnnnnnnnnnnnnnnnnnnnnnnnnnnnnnnnnnnnnnnnnnnnnnnnnnnnnnnnnnnnnnnnnnnnnnnnnnnnnnnnnnnnnnnnnnnnnnnnnnnnnnnnnnnnnnnnnnnnnnnnnnnnnnnnnnnnnnnnnnnnnnnnnnnnnnnnnnnnnnnnnnnnnnnnnnnnnnnnnnnnnnnnnnnnnnnnnnnnnnnnnnnnnnnnnnnnnnnnnnnnnnnnnnnnnnnnnnnnnnnnnnnnnnnnnnnnnnnnnnnnnnnnnnnnnnnnnnnnnnnnnnnnnnnnnnnnnnnnnnnnnnnnnnnnnnnnnnnnnnnnnnnnnnnnnnnnnnnnnnnnnnnnnnnnnnnnnnnnnnnnnnnnnnnnnnnnnnnnnnnnnnnnnnnnnnnnnnnnnnnnnnnnnnnnnnnnnnnnnnnnnnnnnnnnnnnnnnnnnnnnnnnnnnnnnnnnnnnnnnnnnnnnnnnnnnnnnnnnnnnnnnnnnnnnnnnnnnnnnnnnnnnnnnnnnnnnnnnnnnnnnnnnnnnnnnnnnnnnnnnnnnnnnnnnnnnnnnnnnnnnnnnnnnnnnnnnnnnnnnnnnnnnnnnnnnnnnnnnnnnnnnnnnnnnnnnnnnnnnnnnnnnnnnnnnnnnnnnnnnnnnnnnnnnnnnnnnnnnnnnnnnnnnnnnnnnnnnnnnnnnnnnnnnnnnnnnnnnnnnnnnnnnnnnnnnnnnnnnnnnnnnnnnnnnnnnnnnnnnnnnnnnnnnnnnnnnnnnnnnnnnnnnnnnnnnnnnnnnnnnnnnnnnnnnnnnnnnnnnnnnnnnnnnnnnnnnnnnnnnnnnnnnnnnnnnnnnnnnnnnnnnnnnnnnnnnnnnnnnnnnnnnnnnnnnnnnnnnnnnnnnnnnnnnnnnnnnnnnnnnnnnnnnnnnnnnnnnnnnnnnnnnnnnnnnnnnnnnnnnnnnnnnnnnnnnnnnnnnnnnnnnnnnnnnnnnnnnnnnnnnnnnnnnnnnnnnnnnnnnnnnnnnnnnnnnnnnnnnnnnnnnnnnnnnnnnnnnnnnnnnnnnnnnnnnnnnnnnnnnnnnnnnnnnnnnnnnnnnnnnnnnnnnnnnnnnnnnnnnnnnnnnnnnnnnnnnnnnnnnnnnnnnnnnnnnnnnnnnnnnnnnnnnnnnnnnnnnnnnnnnnnnnnnnnnnnnnnnnnnnnnnnnnnnnnnnnnnnnnnnnnnnnnnnnnnnnnnnnnnnnnnnnnnnnnnnnnnnnnnnnnnnnnnnnnnnnnnnnnnnnnnnnnnnnnnnnnnnnnnnnnnnnnnnnnnnnnnnnnnnnnnnnnnnnnnnnnnnnnnnnnnnnnnnnnnnnnnnnnnnnnnnnnnnnnnnnnnnnnnnnnnnnnnnnnnnnnnnnnnnnnnnnnnnnnnnnnnnnnnnnnnnnnnnnnnnnnnnnnnnnnnnnnnnnnnnnnnnnnnnnnnnnnnnnnnnnnnnnnnnnnnnnnnnnnnnnnnnnnnnnnnnnnnnnnnnnnnnnnnnnnnnnnnnnnnnnnnnnnnnnnnnnnnnnnnnnnnnnnnnnnnnnnnnnnnnnnnnnnnnnnnnnnnnnnnnnnnnnnnnnnnnnnnnnnnnnnnnnnnnnnnnnnnnnnnnnnnnnnnnnnnnnnnnnnnnnnnnnnnnnnnnnnnnnnnnnnnnnnnnnnnnnnnnnnnnnnnnnnnnnnnnnnnnnnnnnnnnnnnnnnnnnnnnnnnnnnnnnnnnnnnnnnnnnnnnnnnnnnnnnnnnnnnnnnnnnnnnnnnnnnnnnnnnnnnnnnnnnnnnnnnnnnnnnnnnnnnnnnnnnnnnnnnnnnnnnnnnnnnnnnnnnnnnnnnnnnnnnnnnnnnnnnnnnnnnnnnnnnnnnnnnnnnnnnnnnnnnnnnnnnnnnnnnnnnnnnnnnnnnnnnnnnnnnnnnnnnnnnnnnnnnnnnnnnnnnnnnnnnnnnnnnnnnnnnnnnnnnnnnnnnnnnnnnnnnnnnnnnnnnnnnnnnnnnnnnnnnnnnnnnnnnnnnnnnnnnnnnnnnnnnnnnnnnnnnnnnnnnnnnnnnnnnnnnnnnnnnnnnnnnnnnnnnnnnnnnnnnnnnnnnnnnnnnnnnnnnnnnnnnnnnnnnnnnnnnnnnnnnnnnnnnnnnnnnnnnnnnnnnnnnnnnnnnnnnnnnnnnnnnnnnnnnnnnnnnnnnnnnnnnnnnnnnnnnnnnnnnnnnnnnnnnnnnnnnnnnnnnnnnnnnnnnnnnnnnnnnnnnnnnnnnnnnnnnnnnnnnnnnnnnnnnnnnnnnnnnnnnnnnnnnnnnnnnnnnnnnnnnnnnnnnnnnnnnnnnnnnnnnnnnnnnnnnnnnnnnnnnnnnnnnnnnnnnnnnnnnnnnnnnnnnnnnnnnnnnnnnnnnnnnnnnnnnnnnnnnnnnnnnnnnnnnnnnnnnnnnnnnnnnnnnnnnnnnnnnnnnnnnnnnnnnnnnnnnnnnnnnnnnnnnnnnnnnnnnnnnnnnnnnnnnnnnnnnnnnnnnnnnnnnnnnnnnnnnnnnnnnnnnnnnnnnnnnnnnnnnnnnnnnnnnnnnnnnnnnnnnnnnnnnnnnnnnnnnnnnnnnnnnnnnnnnnnnnnnnnnnnnnnnnnnnnnnnnnnnnnnnnnnnnnnnnnnnnnnnnnnnnnnnnnnnnnnnnnnnnnnnnnnnnnnnnnnnnnnnnnnnnnnnnnnnnnnnnnnnnnnnnnnnnnnnnnnnnnnnnnnnnnnnnnnnnnnnnnnnnnnnnnnnnnnnnnnnnnnnnnnnnnnnnnnnnnnnnnnnnnnnnnnnnnnnnnnnnnnnnnnnnnnnnnnnnnnnnnnnnnnnnnnnnnnnnnnnnnnnnnnnnnnnnnnnnnnnnnnnnnnnnnnnnnnnnnnnnnnnnnnnnnnnnnnnnnnnnnnnnnnnnnnnnnnnnnnnnnnnnnnnnnnnnnnnnnnnnnnnnnnnnnnnnnnnnnnnnnnnnnnnnnnnnnnnnnnnnnnnnnnnnnnnnnnnnnnnnnnnnnnnnnnnnnnnnnnnnnnnnnnnnnnnnnnnnnnnnnnnnnnnnnnnnnnnnnnnnnnnnnnnnnnnnnnnnnnnnnnnnnnnnnnnnnnnnnnnnnnnnnnnnnnnnnnnnnnnnnnnnnnnnnnnnnnnnnnnnnnnnnnnnnnnnnnnnnnnnnnnnnnnnnnnnnnnnnnnnnnnnnnnnnnnnnnnnnnnnnnnnnnnnnnnnnnnnnnnnnnnnnnnnnnnnnnnnnnnnnnnnnnnnnnnnnnnnnnnnnnnnnnnnnnnnnnnnnnnnnnnnnnnnnnnnnnnnnnnnnnnnnnnnnnnnnnnnnnnnnnnnnnnnnnnnnnnnnnnnnnnnnnnnnnnnnnnnnnnnnnnnnnnnnnnnnnnnnnnnnnnnnnnnnnnnnnnnnnnnnnnnnnnnnnnnnnnnnnnnnnnnnnnnnnnnnnnnnnnnnnnnnnnnnnnnnnnnnnnnnnnnnnnnnnnnnnnnnnnnnnnnnnnnnnnnnnnnnnnnnnnnnnnnnnnnnnnnnnnnnnnnnnnnnnnnnnnnnnnnnnnnnnnnnnnnnnnnnnnnnnnnnnnnnnnnnnnnnnnnnnnnnnnnnnnnnnnnnnnnnnnnnnnnnnnnnnnnnnnnnnnnnnnnnnnnnnnnnnnnnnnnnnnnnnnnnnnnnnnnnnnnnnnnnnnnnnnnnnnnnnnnnnnnnnnnnnnnnnnnnnnnnnnnnnnnnnnnnnnnnnnnnnnnnnnnnnnnnnnnnnnnnnnnnnnnnnnnnnnnnnnnnnnnnnnnnnnnnnnnnnnnnnnnnnnnnnnnnnnnnnnnnnnnnnnnnnnnnnnnnnnnnnnnnnnnnnnnnnnnnnnnnnnnnnnnnnnnnnnnnnnnnnnnnnnnnnnnnnnnnnnnnnnnnnnnnnnnnnnnnnnnnnnnnnnnnnnnnnnnnnnnnnnnnnnnnnnnnnnnnnnnnnnnnnnnnnnnnnnnnnnnnnnnnnnnnnnnnnnnnnnnnnnnnnnnnnnnnnnnnnnnnnnnnnnnnnnnnnnnnnnnnnnnnnnnnnnnnnnnnnnnnnnnnnnnnnnnnnnnnnnnnnnnnnnnnnnnnnnnnnnnnnnnnnnnnnnnnnnnnnnnnnnnnnnnnnnnnnnnnnnnnnnnnnnnnnnnnnnnnnnnnnnnnnnnnnnnnnnnnnnnnnnnnnnnnnnnnnnnnnnnnnnnnnnnnnnnnnnnnnnnnnnnnnnnnnnnnnnnnnnnnnnnnnnnnnnnnnnnnnnnnnnnnnnnnnnnnnnnnnnnnnnnnnnnnnnnnnnnnnnnnnnnnnnnnnnnnnnnnnnnnnnnnnnnnnnnnnnnnnnnnnnnnnnnnnnnnnnnnnnnnnnnnnnnnnnnnnnnnnnnnnnnnnnnnnnnnnnnnnnnnnnnnnnnnnnnnnnnnnnnnnnnnnnnnnnnnnnnnnnnnnnnnnnnnnnnnnnnnnnnnnnnnnnnnnnnnnnnnnnnnnnnnnnnnnnnnnnnnnnnnnnnnnnnnnnnnnnnnnnnnnnnnnnnnnnnnnnnnnnnnnnnnnnnnnnnnnnnnnnnnnnnnnnnnnnnnnnnnnnnnnnnnnnnnnnnnnnnnnnnnnnnnnnnnnnnnnnnnnnnnnnnnnnnnnnnnnnnnnnnnnnnnnnnnnnnnnnnnnnnnnnnnnnnnnnnnnnnnnnnnnnnnnnnnnnnnnnnnnnnnnnnnnnnnnnnnnnnnnnnnnnnnnnnnnnnnnnnnnnnnnnnnnnnnnnnnnnnnnnnnnnnnnnnnnnnnnnnnnnnnnnnnnnnnnnnnnnnnnnnnnnnnnnnnnnnnnnnnnnnnnnnnnnnnnnnnnnnnnnnnnnnnnnnnnnnnnnnnnnnnnnnnnnnnnnnnnnnnnnnnnnnnnnnnnnnnnnnnnnnnnnnnnnnnnnnnnnnnnnnnnnnnnnnnnnnnnnnnnnnnnnnnnnnnnnnnnnnnnnnnnnnnnnnnnnnnnnnnnnnnnnnnnnnnnnnnnnnnnnnnnnnnnnnnnnnnnnnnnnnnnnnnnnnnnnnnnnnnnnnnnnnnnnnnnnnnnnnnnnnnnnnnnnnnnnnnnnnnnnnnnnnnnnnnnnnnnnnnnnnnnnnnnnnnnnnnnnnnnnnnnnnnnnnnnnnnnnnnnnnnnnnnnnnnnnnnnnnnnnnnnnnnnnnnnnnnnnnnnnnnnnnnnnnnnnnnnnnnnnnnnnnnnnnnnnnnnnnnnnnnnnnnnnnnnnnnnnnnnnnnnnnnnnnnnnnnnnnnnnnnnnnnnnnnnnnnnnnnnnnnnnnnnnnnnnnnnnnnnnnnnnnnnnnnnnnnnnnnnnnnnnnnnnnnnnnnnnnnnnnnnnnnnnnnnnnnnnnnnnnnnnnnnnnnnnnnnnnnnnnnnnnnnnnnnnnnnnnnnnnnnnnnnnnnnnnnnnnnnnnnnnnnnnnnnnnnnnnnnnnnnnnnnnnnnnnnnnnnnnnnnnnnnnnnnnnnnnnnnnnnnnnnnnnnnnnnnnnnnnnnnnnnnnnnnnnnnnnnnnnnnnnnnnnnnnnnnnnnnnnnnnnnnnnnnnnnnnnnnnnnnnnnnnnnnnnnnnnnnnnnnnnnnnnnnnnnnnnnnnnnnnnnnnnnnnnnnnnnnnnnnnnnnnnnnnnnnnnnnnnnnnnnnnnnnnnnnnnnnnnnnnnnnnnnnnnnnnnnnnnnnnnnnnnnnnnnnnnnnnnnnnnnnnnnnnnnnnnnnnnnnnnnnnnnnnnnnnnnnnnnnnnnnnnnnnnnnnnnnnnnnnnnnnnnnnnnnnnnnnnnnnnnnnnnnnnnnnnnnnnnnnnnnnnnnnnnnnnnnnnnnnnnnnnnnnnnnnnnnnnnnnnnnnnnnnnnnnnnnnnnnnnnnnnnnnnnnnnnnnnnnnnnnnnnnnnnnnnnnnnnnnnnnnnnnnnnnnnnnnnnnnnnnnnnnnnnnnnnnnnnnnnnnnnnnnnnnnnnnnnnnnnnnnnnnnnnnnnnnnnnnnnnnnnnnnnnnnnnnnnnnnnnnnnnnnnnnnnnnnnnnnnnnnnnnnnnnnnnnnnnnnnnnnnnnnnnnnnnnnnnnnnnnnnnnnnnnnnnnnnnnnnnnnnnnnnnnnnnnnnnnnnnnnnnnnnnnnnnnnnnnnnnnnnnnnnnnnnnnnnnnnnnnnnnnnnnnnnnnnnnnnnnnnnnnnnnnnnnnnnnnnnnnnnnnnnnnnnnnnnnnnnnnnnnnnnnnnnnnnnnnnnnnnnnnnnnnnnnnnnnnnnnnnnnnnnnnnnnnnnnnnnnnnnnnnnnnnnnnnnnnnnnnnnnnnnnnnnnnnnnnnnnnnnnnnnnnnnnnnnnnnnnnnnnnnnnnnnnnnnnnnnnnnnnnnnnnnnnnnnnnnnnnnnnnnnnnnnnnnnnnnnnnnnnnnnnnnnnnnnnnnnnnnnnnnnnnnnnnnnnnnnnnnnnnnnnnnnnnnnnnnnnnnnnnnnnnnnnnnnnnnnnnnnnnnnnnnnnnnnnnnnnnnnnnnnnnnnnnnnnnnnnnnnnnnnnnnnnnnnnnnnnnnnnnnnnnnnnnnnnnnnnnnnnnnnnnnnnnnnnnnnnnnnnnnnnnnnnnnnnnnnnnnnnnnnnnnnnnnnnnnnnnnnnnnnnnnnnnnnnnnnnnnnnnnnnnnnnnnnnnnnnnnnnnnnnnnnnnnnnnnnnnnnnnnnnnnnnnnnnnnnnnnnnnnnnnnnnnnnnnnnnnnnnnnnnnnnnnnnnnnnnnnnnnnnnnnnnnnnnnnnnnnnnnnnnnnnnnnnnnnnnnnnnnnnnnnnnnnnnnnnnnnnnnnnnnnnnnnnnnnnnnnnnnnnnnnnnnnnnnnnnnnnnnnnnnnnnnnnnnnnnnnnnnnnnnnnnnnnnnnnnnnnnnnnnnnnnnnnnnnnnnnnnnnnnnnnnnnnnnnnnnnnnnnnnnnnnnnnnnnnnnnnnnnnnnnnnnnnnnnnnnnnnnnnnnnnnnnnnnnnnnnnnnnnnnnnnnnnnnnnnnnnnnnnnnnnnnnnnnnnnnnnnnnnnnnnnnnnnnnnnnnnnnnnnnnnnnnnnnnnnnnnnnnnnnnnnnnnnnnnnnnnnnnnnnnnnnnnnnnnnnnnnnnnnnnnnnnnnnnnnnnnnnnnnnnnnnnnnnnnnnnnnnnnnnnnnnnnnnnnnnnnnnnnnnnnnnnnnnnnnnnnnnnnnnnnnnnnnnnnnnnnnnnnnnnnnnnnnnnnnnnnnnnnnnnnnnnnnnnnnnnnnnnnnnnnnnnnnnnnnnnnnnnnnnnnnnnnnnnnnnnnnnnnnnnnnnnnnnnnnnnnnnnnnnnnnnnnnnnnnnnnnnnnnnnnnnnnnnnnnnnnnnnnnnnnnnnnnnnnnnnnnnnnnnnnnnnnnnnnnnnnnnnnnnnnnnnnnnnnnnnnnnnnnnnnnnnnnnnnnnnnnnnnnnnnnnnnnnnnnnnnnnnnnnnnnnnnnnnnnnnnnnnnnnnnnnnnnnnnnnnnnnnnnnnnnnnnnnnnnnnnnnnnnnnnnnnnnnnnnnnnnnnnnnnnnnnnnnnnnnnnnnnnnnnnnnnnnnnnnnnnnnnnnnnnnnnnnnnnnnnnnnnnnnnnnnnnnnnnnnnnnnnnnnnnnnnnnnnnnnnnnnnnnnnnnnnnnnnnnnnnnnnnnnnnnnnnnnnnnnnnnnnnnnnnnnnnnnnnnnnnnnnnnnnnnnnnnnnnnnnnnnnnnnnnnnnnnnnnnnnnnnnnnnnnnnnnnnnnnnnnnnnnnnnnnnnnnnnnnnnnnnnnnnnnnnnnnnnnnnnnnnnnnnnnnnnnnnnnnnnnnnnnnnnnnnnnnnnnnnnnnnnnnnnnnnnnnnnnnnnnnnnnnnnnnnnnnnnnnnnnnnnnnnnnnnnnnnnnnnnnnnnnnnnnnnnnnnnnnnnnnnnnnnnnnnnnnnnnnnnnnnnnnnnnnnnnnnnnnnnnnnnnnnnnnnnnnnnnnnnnnnnnnnnnnnnnnnnnnnnnnnnnnnnnnnnnnnnnnnnnnnnnnnnnnnnnnnnnnnnnnnnnnnnnnnnnnnnnnnnnnnnnnnnnnnnnnnnnnnnnnnnnnnnnnnnnnnnnnnnnnnnnnnnnnnnnnnnnnnnnnnnnnnnnnnnnnnnnnnnnnnnnnnnnnnnnnnnnnnnnnnnnnnnnnnnnnnnnnnnnnnnnnnnnnnnnnnnnnnnnnnnnnnnnnnnnnnnnnnnnnnnnnnnnnnnnnnnnnnnnnnnnnnnnnnnnnnnnnnnnnnnnnnnnnnnnnnnnnnnnnnnnnnnnnnnnnnnnnnnnnnnnnnnnnnnnnnnnnnnnnnnnnnnnnnnnnnnnnnnnnnnnnnnnnnnnnnnnnnnnnnnnnnnnnnnnnnnnnnnnnnnnnnnnnnnnnnnnnnnnnnnnnnnnnnnnnnnnnnnnnnnnnnnnnnnnnnnnnnnnnnnnnnnnnnnnnnnnnnnnnnnnnnnnnnnnnnnnnnnnnnnnnnnnnnnnnnnnnnnnnnnnnnnnnnnnnnnnnnnnnnnnnnnnnnnnnnnnnnnnnnnnnnnnnnnnnnnnnnnnnnnnnnnnnnnnnnnnnnnnnnnnnnnnnnnnnnnnnnnnnnnnnnnnnnnnnnnnnnnnnnnnnnnnnnnnnnnnnnnnnnnnnnnnnnnnnnnnnnnnnnnnnnnnnnnnnnnnnnnnnnnnnnnnnnnnnnnnnnnnnnnnnnnnnnnnnnnnnnnnnnnnnnnnnnnnnnnnnnnnnnnnnnnnnnnnnnnnnnnnnnnnnnnnnnnnnnnnnnnnnnnnnnnnnnnnnnnnnnnnnnnnnnnnnnnnnnnnnnnnnnnnnnnnnnnnnnnnnnnnnnnnnnnnnnnnnnnnnnnnnnnnnnnnnnnnnnnnnnnnnnnnnnnnnnnnnnnnnnnnnnnnnnnnnnnnnnnnnnnnnnnnnnnnnnnnnnnnnnnnnnnnnnnnnnnnnnnnnnnnnnnnnnnnnnnnnnnnnnnnnnnnnnnnnnnnnnnnnnnnnnnnnnnnnnnnnnnnnnnnnnnnnnnnnnnnnnnnnnnnnnnnnnnnnnnnnnnnnnnnnnnnnnnnnnnnnnnnnnnnnnnnnnnnnnnnnnnnnnnnnnnnnnnnnnnnnnnnnnnnnnnnnnnnnnnnnnnnnnnnnnnnnnnnnnnnnnnnnnnnnnnnnnnnnnnnnnnnnnnnnnnnnnnnnnnnnnnnnnnnnnnnnnnnnnnnnnnnnnnnnnnnnnnnnnnnnnnnnnnnnnnnnnnnnnnnnnnnnnnnnnnnnnnnnnnnnnnnnnnnnnnnnnnnnnnnnnnnnnnnnnnnnnnnnnnnnnnnnnnnnnnnnnnnnnnnnnnnnnnnnnnnnnnnnnnnnnnnnnnnnnnnnnnnnnnnnnnnnnnnnnnnnnnnnnnnnnnnnnnnnnnnnnnnnnnnnnnnnnnnnnnnnnnnnnnnnnnnnnnnnnnnnnnnnnnnnnnnnnnnnnnnnnnnnnnnnnnnnnnnnnnnnnnnnnnnnnnnnnnnnnnnnnnnnnnnnnnnnnnnnnnnnnnnnnnnnnnnnnnnnnnnnnnnnnnnnnnnnnnnnnnnnnnnnnnnnnnnnnnnnnnnnnnnnnnnnnnnnnnnnnnnnnnnnnnnnnnnnnnnnnnnnnnnnnnnnnnnnnnnnnnnnnnnnnnnnnnnnnnnnnnnnnnnnnnnnnnnnnnnnnnnnnnnnnnnnnnnnnnnnnnnnnnnnnnnnnnnnnnnnnnnnnnnnnnnnnnnnnnnnnnnnnnnnnnnnnnnnnnnnnnnnnnnnnnnnnnnnnnnnnnnnnnnnnnnnnnnnnnnnnnnnnnnnnnnnnnnnnnnnnnnnnnnnnnnnnnnnnnnnnnnnnnnnnnnnnnnnnnnnnnnnnnnnnnnnnnnnnnnnnnnnnnnnnnnnnnnnnnnnnnnnnnnnnnnnnnnnnnnnnnnnnnnnnnnnnnnnnnnnnnnnnnnnnnnnnnnnnnnnnnnnnnnnnnnnnnnnnnnnnnnnnnnnnnnnnnnnnnnnnnnnnnnnnnnnnnnnnnnnnnnnnnnnnnnnnnnnnnnnnnnnnnnnnnnnnnnnnnnnnnnnnnnnnnnnnnnnnnnnnnnnnnnnnnnnnnnnnnnnnnnnnnnnnnnnnnnnnnnnnnnnnnnnnnnnnnnnnnnnnnnnnnnnnnnnnnnnnnnnnnnnnnnnnnnnnnnnnnnnnnnnnnnnnnnnnnnnnnnnnnnnnnnnnnnnnnnnnnnnnnnnnnnnnnnnnnnnnnnnnnnnnnnnnnnnnnnnnnnnnnnnnnnnnnnnnnnnnnnnnnnnnnnnnnnnnnnnnnnnnnnnnnnnnnnnnnnnnnnnnnnnnnnnnnnnnnnnnnnnnnnnnnnnnnnnnnnnnnnnnnnnnnnnnnnnnnnnnnnnnnnnnnnnnnnnnnnnnnnnnnnnnnnnnnnnnnnnnnnnnnnnnnnnnnnnnnnnnnnnnnnnnnnnnnnnnnnnnnnnnnnnnnnnnnnnnnnnnnnnnnnnnnnnnnnnnnnnnnnnnnnnnnnnnnnnnnnnnnnnnnnnnnnnnnnnnnnnnnnnnnnnnnnnnnnnnnnnnnnnnnnnnnnnnnnnnnnnnnnnnnnnnnnnnnnnnnnnnnnnnnnnnnnnnnnnnnnnnnnnnnnnnnnnnnnnnnnnnnnnnnnnnnnnnnnnnnnnnnnnnnnnnnnnnnnnnnnnnnnnnnnnnnnnnnnnnnnnnnnnnnnnnnnnnnnnnnnnnnnnnnnnnnnnnnnnnnnnnnnnnnnnnnnnnnnnnnnnnnnnnnnnnnnnnnnnnnnnnnnnnnnnnnnnnnnnnnnnnnnnnnnnnnnnnnnnnnnnnnnnnnnnnnnnnnnnnnnnnnnnnnnnnnnnnnnnnnnnnnnnnnnnnnnnnnnnnnnnnnnnnnnnnnnnnnnnnnnnnnnnnnnnnnnnnnnnnnnnnnnnnnnnnnnnnnnnnnnnnnnnnnnnnnnnnnnnnnnnnnnnnnnnnnnnnnnnnnnnnnnnnnnnnnnnnnnnnnnnnnnnnnnnnnnnnnnnnnnnnnnnnnnnnnnnnnnnnnnnnnnnnnnnnnnnnnnnnnnnnnnnnnnnnnnnnnnnnnnnnnnnnnnnnnnnnnnnnnnnnnnnnnnnnnnnnnnnnnnnnnnnnnnnnnnnnnnnnnnnnnnnnnnnnnnnnnnnnnnnnnnnnnnnnnnnnnnnnnnnnnnnnnnnnnnnnnnnnnnnnnnnnnnnnnnnnnnnnnnnnnnnnnnnnnnnnnnnnnnnnnnnnnnnnnnnnnnnnnnnnnnnnnnnnnnnnnnnnnnnnnnnnnnnnnnnnnnnnnnnnnnnnnnnnnnnnnnnnnnnnnnnnnnnnnnnnnnnnnnnnnnnnnnnnnnnnnnnnnnnnnnnnnnnnnnnnnnnnnnnnnnnnnnnnnnnnnnnnnnnnnnnnnnnnnnnnnnnnnnnnnnnnnnnnnnnnnnnnnnnnnnnnnnnnnnnnnnnnnnnnnnnnnnnnnnnnnnnnnnnnnnnnnnnnnnnnnnnnnnnnnnnnnnnnnnnnnnnnnnnnnnnnnnnnnnnnnnnnnnnnnnnnnnnnnnnnnnnnnnnnnnnnnnnnnnnnnnnnnnnnnnnnnnnnnnnnnnnnnnnnnnnnnnnnnnnnnnnnnnnnnnnnnnnnnnnnnnnnnnnnnnnnnnnnnnnnnnnnnnnnnnnnnnnnnnnnnnnnnnnnnnnnnnnnnnnnnnnnnnnnnnnnnnnnnnnnnnnnnnnnnnnnnnnnnnnnnnnnnnnnnnnnnnnnnnnnnnnnnnnnnnnnnnnnnnnnnnnnnnnnnnnnnnnnnnnnnnnnnnnnnnnnnnnnnnnnnnnnnnnnnnnnnnnnnnnnnnnnnnnnnnnnnnnnnnnnnnnnnnnnnnnnnnnnnnnnnnnnnnnnnnnnnnnnnnnnnnnnnnnnnnnnnnnnnnnnnnnnnnnnnnnnnnnnnnnnnnnnnnnnnnnnnnnnnnnnnnnnnnnnnnnnnnnnnnnnnnnnnnnnnnnnnnnnnnnnnnnnnnnnnnnnnnnnnnnnnnnnnnnnnnnnnnnnnnnnnnnnnnnnnnnnnnnnnnnnnnnnnnnnnnnnnnnnnnnnnnnnnnnnnnnnnnnnnnnnnnnnnnnnnnnnnnnnnnnnnnnnnnnnnnnnnnnnnnnnnnnnnnnnnnnnnnnnnnnnnnnnnnnnnnnnnnnnnnnnnnnnnnnnnnnnnnnnnnnnnnnnnnnnnnnnnnnnnnnnnnnnnnnnnnnnnnnnnnnnnnnnnnnnnnnnnnnnnnnnnnnnnnnnnnnnnnnnnnnnnnnnnnnnnnnnnnnnnnnnnnnnnnnnnnnnnnnnnnnnnnnnnnnnnnnnnnnnnnnnnnnnnnnnnnnnnnnnnnnnnnnnnnnnnnnnnnnnnnnnnnnnnnnnnnnnnnnnnnnnnnnnnnnnnnnnnnnnnnnnnnnnnnnnnnnnnnnnnnnnnnnnnnnnnnnnnnnnnnnnnnnnnnnnnnnnnnnnnnnnnnnnnnnnnnnnnnnnnnnnnnnnnnnnnnnnnnnnnnnnnnnnnnnnnnnnnnnnnnnnnnnnnnnnnnnnnnnnnnnnnnnnnnnnnnnnnnnnnnnnnnnnnnnnnnnnnnnnnnnnnnnnnnnnnnnnnnnnnnnnnnnnnnnnnnnnnnnnnnnnnnnnnnnnnnnnnnnnnnnnnnnnnnnnnnnnnnnnnnnnnnnnnnnnnnnnnnnnnnnnnnnnnnnnnnnnnnnnnnnnnnnnnnnnnnnnnnnnnnnnnnnnnnnnnnnnnnnnnnnnnnnnnnnnnnnnnnnnnnnnnnnnnnnnnnnnnnnnnnnnnnnnnnnnnnnnnnnnnnnnnnnnnnnnnnnnnnnnnnnnnnnnnnnnnnnnnnnnnnnnnnnnnnnnnnnnnnnnnnnnnnnnnnnnnnnnnnnnnnnnnnnnnnnnnnnnnnnnnnnnnnnnnnnnnnnnnnnnnnnnnnnnnnnnnnnnnnnnnnnnnnnnnnnnnnnnnnnnnnnnnnnnnnnnnnnnnnnnnnnnnnnnnnnnnnnnnnnnnnnnnnnnnnnnnnnnnnnnnnnnnnnnnnnnnnnnnnnnnnnnnnnnnnnnnnnnnnnnnnnnnnnnnnnnnnnnnnnnnnnnnnnnnnnnnnnnnnnnnnnnnnnnnnnnnnnnnnnnnnnnnnnnnnnnnnnnnnnnnnnnnnnnnnnnnnnnnnnnnnnnnnnnnnnnnnnnnnnnnnnnnnnnnnnnnnnnnnnnnnnnnnnnnnnnnnnnnnnnnnnnnnnnnnnnnnnnnnnnnnnnnnnnnnnnnnnnnnnnnnnnnnnnnnnnnnnnnnnnnnnnnnnnnnnnnnnnnnnnnnnnnnnnnnnnnnnnnnnnnnnnnnnnnnnnnnnnnnnnnnnnnnnnnnnnnnnnnnnnnnnnnnnnnnnnnnnnnnnnnnnnnnnnnnnnnnnnnnnnnnnnnnnnnnnnnnnnnnnnnnnnnnnnnnnnnnnnnnnnnnnnnnnnnnnnnnnnnnnnnnnnnnnnnnnnnnnnnnnnnnnnnnnnnnnnnnnnnnnnnnnnnnnnnnnnnnnnnnnnnnnnnnnnnnnnnnnnnnnnnnnnnnnnnnnnnnnnnnnnnnnnnnnnnnnnnnnnnnnnnnnnnnnnnnnnnnnnnnnnnnnnnnnnnnnnnnnnnnnnnnnnnnnnnnnnnnnnnnnnnnnnnnnnnnnnnnnnnnnnnnnnnnnnnnnnnnnnnnnnnnnnnnnnnnnnnnnnnnnnnnnnnnnnnnnnnnnnnnnnnnnnnnnnnnnnnnnnnnnnnnnnnnnnnnnnnnnnnnnnnnnnnnnnnnnnnnnnnnnnnnnnnnnnnnnnnnnnnnnnnnnnnnnnnnnnnnnnnnnnnnnnnnnnnnnnnnnnnnnnnnnnnnnnnnnnnnnnnnnnnnnnnnnnnnnnnnnnnnnnnnnnnnnnnnnnnnnnnnnnnnnnnnnnnnnnnnnnnnnnnnnnnnnnnnnnnnnnnnnnnnnnnnnnnnnnnnnnnnnnnnnnnnnnnnnnnnnnnnnnnnnnnnnnnnnnnnnnnnnnnnnnnnnnnnnnnnnnnnnnnnnnnnnnnnnnnnnnnnnnnnnnnnnnnnnnnnnnnnnnnnnnnnnnnnnnnnnnnnnnnnnnnnnnnnnnnnnnnnnnnnnnnnnnnnnnnnnnnnnnnnnnnnnnnnnnnnnnnnnnnnnnnnnnnnnnnnnnnnnnnnnnnnnnnnnnnnnnnnnnnnnnnnnnnnnnnnnnnnnnnnnnnnnnnnnnnnnnnnnnnnnnnnnnnnnnnnnnnnnnnnnnnnnnnnnnnnnnnnnnnnnnnnnnnnnnnnnnnnnnnnnnnnnnnnnnnnnnnnnnnnnnnnnnnnnnnnnnnnnnnnnnnnnnnnnnnnnnnnnnnnnnnnnnnnnnnnnnnnnnnnnnnnnnnnnnnnnnnnnnnnnnnnnnnnnnnnnnnnnnnnnnnnnnnnnnnnnnnnnnnnnnnnnnnnnnnnnnnnnnnnnnnnnnnnnnnnnnnnnnnnnnnnnnnnnnnnnnnnnnnnnnnnnnnnnnnnnnnnnnnnnnnnnnnnnnnnnnnnnnnnnnnnnnnnnnnnnnnnnnnnnnnnnnnnnnnnnnnnnnnnnnnnnnnnnnnnnnnnnnnnnnnnnnnnnnnnnnnnnnnnnnnnnnnnnnnnnnnnnnnnnnnnnnnnnnnnnnnnnnnnnnnnnnnnnnnnnnnnnnnnnnnnnnnnnnnnnnnnnnnnnnnnnnnnnnnnnnnnnnnnnnnnnnnnnnnnnnnnnnnnnnnnnnnnnnnnnnnnnnnnnnnnnnnnnnnnnnnnnnnnnnnnnnnnnnnnnnnnnnnnnnnnnnnnnnnnnnnnnnnnnnnnnnnnnnnnnnnnnnnnnnnnnnnnnnnnnnnnnnnnnnnnnnnnnnnnnnnnnnnnnnnnnnnnnnnnnnnnnnnnnnnnnnnnnnnnnnnnnnnnnnnnnnnnnnnnnnnnnnnnnnnnnnnnnnnnnnnnnnnnnnnnnnnnnnnnnnnnnnnnnnnnnnnnnnnnnnnnnnnnnnnnnnnnnnnnnnnnnnnnnnnnnnnnnnnnnnnnnnnnnnnnnnnnnnnnnnnnnnnnnnnnnnnnnnnnnnnnnnnnnnnnnnnnnnnnnnnnnnnnnnnnnnnnnnnnnnnnnnnnnnnnnnnnnnnnnnnnnnnnnnnnnnnnnnnnnnnnnnnnnnnnnnnnnnnnnnnnnnnnnnnnnnnnnnnnnnnnnnnnnnnnnnnnnnnnnnnnnnnnnnnnnnnnnnnnnnnnnnnnnnnnnnnnnnnnnnnnnnnnnnnnnnnnnnnnnnnnnnnnnnnnnnnnnnnnnnnnnnnnnnnnnnnnnnnnnnnnnnnnnnnnnnnnnnnnnnnnnnnnnnnnnnnnnnnnnnnnnnnnnnnnnnnnnnnnnnnnnnnnnnnnnnnnnnnnnnnnnnnnnnnnnnnnnnnnnnnnnnnnnnnnnnnnnnnnnnnnnnnnnnnnnnnnnnnnnnnnnnnnnnnnnnnnnnnnnnnnnnnnnnnnnnnnnnnnnnnnnnnnnnnnnnnnnnnnnnnnnnnnnnnnnnnnnnnnnnnnnnnnnnnnnnnnnnnnnnnnnnnnnnnnnnnnnnnnnnnnnnnnnnnnnnnnnnnnnnnnnnnnnnnnnnnnnnnnnnnnnnnnnnnnnnnnnnnnnnnnnnnnnnnnnnnnnnnnnnnnnnnnnnnnnnnnnnnnnnnnnnnnnnnnnnnnnnnnnnnnnnnnnnnnnnnnnnnnnnnnnnnnnnnnnnnnnnnnnnnnnnnnnnnnnnnnnnnnnnnnnnnnnnnnnnnnnnnnnnnnnnnnnnnnnnnnnnnnnnnnnnnnnnnnnnnnnnnnnnnnnnnnnnnnnnnnnnnnnnnnnnnnnnnnnnnnnnnnnnnnnnnnnnnnnnnnnnnnnnnnnnnnnnnnnnnnnnnnnnnnnnnnnnnnnnnnnnnnnnnnnnnnnnnnnnnnnnnnnnnnnnnnnnnnnnnnnnnnnnnnnnnnnnnnnnnnnnnnnnnnnnnnnnnnnnnnnnnnnnnnnnnnnnnnnnnnnnnnnnnnnnnnnnnnnnnnnnnnnnnnnnnnnnnnnnnnnnnnnnnnnnnnnnnnnnnnnnnnnnnnnnnnnnnnnnnnnnnnnnnnnnnnnnnnnnnnnnnnnnnnnnnnnnnnnnnnnnnnnnnnnnnnnnnnnnnnnnnnnnnnnnnnnnnnnnnnnnnnnnnnnnnnnnnnnnnnnnnnnnnnnnnnnnnnnnnnnnnnnnnnnnnnnnnnnnnnnnnnnnnnnnnnnnnnnnnnnnnnnnnnnnnnnnnnnnnnnnnnnnnnnnnnnnnnnnnnnnnnnnnnnnnnnnnnnnnnnnnnnnnnnnnnnnnnnnnnnnnnnnnnnnnnnnnnnnnnnnnnnnnnnnnnnnnnnnnnnnnnnnnnnnnnnnnnnnnnnnnnnnnnnnnnnnnnnnnnnnnnnnnnnnnnnnnnnnnnnnnnnnnnnnnnnnnnnnnnnnnnnnnnnnnnnnnnnnnnnnnnnnnnnnnnnnnnnnnnnnnnnnnnnnnnnnnnnnnnnnnnnnnnnnnnnnnnnnnnnnnnnnnnnnnnnnnnnnnnnnnnnnnnnnnnnnnnnnnnnnnnnnnnnnnnnnnnnnnnnnnnnnnnnnnnnnnnnnnnnnnnnnnnnnnnnnnnnnnnnnnnnnnnnnnnnnnnnnnnnnnnnnnnnnnnnnnnnnnnnnnnnnnnnnnnnnnnnnnnnnnnnnnnnnnnnnnnnnnnnnnnnnnnnnnnnnnnnnnnnnnnnnnnnnnnnnnnnnnnnnnnnnnnnnnnnnnnnnnnnnnnnnnnnnnnnnnnnnnnnnnnnnnnnnnnnnnnnnnnnnnnnnnnnnnnnnnnnnnnnnnnnnnnnnnnnnnnnnnnnnnnnnnnnnnnnnnnnnnnnnnnnnnnnnnnnnnnnnnnnnnnnnnnnnnnnnnnnnnnnnnnnnnnnnnnnnnnnnnnnnnnnnnnnnnnnnnnnnnnnnnnnnnnnnnnnnnnnnnnnnnnnnnnnnnnnnnnnnnnnnnnnnnnnnnnnnnnnnnnnnnnnnnnnnnnnnnnnnnnnnnnnnnnnnnnnnnnnnnnnnnnnnnnnnnnnnnnnnnnnnnnnnnnnnnnnnnnnnnnnnnnnnnnnnnnnnnnnnnnnnnnnnnnnnnnnnnnnnnnnnnnnnnnnnnnnnnnnnnnnnnnnnnnnnnnnnnnnnnnnnnnnnnnnnnnnnnnnnnnnnnnnnnnnnnnnnnnnnnnnnnnnnnnnnnnnnnnnnnnnnnnnnnnnnnnnnnnnnnnnnnnnnnnnnnnnnnnnnnnnnnnnnnnnnnnnnnnnnnnnnnnnnnnnnnnnnnnnnnnnnnnnnnnnnnnnnnnnnnnnnnnnnnnnnnnnnnnnnnnnnnnnnnnnnnnnnnnnnnnnnnnnnnnnnnnnnnnnnnnnnnnnnnnnnnnnnnnnnnnnnnnnnnnnnnnnnnnnnnnnnnnnnnnnnnnnnnnnnnnnnnnnnnnnnnnnnnnnnnnnnnnnnnnnnnnnnnnnnnnnnnnnnnnnnnnnnnnnnnnnnnnnnnnnnnnnnnnnnnnnnnnnnnnnnnnnnnnnnnnnnnnnnnnnnnnnnnnnnnnnnnnnnnnnnnnnnnnnnnnnnnnnnnnnnnnnnnnnnnnnnnnnnnnnnnnnnnnnnnnnnnnnnnnnnnnnnnnnnnnnnnnnnnnnnnnnnnnnnnnnnnnnnnnnnnnnnnnnnnnnnnnnnnnnnnnnnnnnnnnnnnnnnnnnnnnnnnnnnnnnnnnnnnnnnnnnnnnnnnnnnnnnnnnnnnnnnnnnnnnnnnnnnnnnnnnnnnnnnnnnnnnnnnnnnnnnnnnnnnnnnnnnnnnnnnnnnnnnnnnnnnnnnnnnnnnnnnnnnnnnnnnnnnnnnnnnnnnnnnnnnnnnnnnnnnnnnnnnnnnnnnnnnnnnnnnnnnnnnnnnnnnnnnnnnnnnnnnnnnnnnnnnnnnnnnnnnnnnnnnnnnnnnnnnnnnnnnnnnnnnnnnnnnnnnnnnnnnnnnnnnnnnnnnnnnnnnnnnnnnnnnnnnnnnnnnnnnnnnnnnnnnnnnnnnnnnnnnnnnnnnnnnnnnnnnnnnnnnnnnnnnnnnnnnnnnnnnnnnnnnnnnnnnnnnnnnnnnnnnnnnnnnnnnnnnnnnnnnnnnnnnnnnnnnnnnnnnnnnnnnnnnnnnnnnnnnnnnnnnnnnnnnnnnnnnnnnnnnnnnnnnnnnnnnnnnnnnnnnnnnnnnnnnnnnnnnnnnnnnnnnnnnnnnnnnnnnnnnnnnnnnnnnnnnnnnnnnnnnnnnnnnnnnnnnnnnnnnnnnnnnnnnnnnnnnnnnnnnnnnnnnnnnnnnnnnnnnnnnnnnnnnnnnnnnnnnnnnnnnnnnnnnnnnnnnnnnnnnnnnnnnnnnnnnnnnnnnnnnnnnnnnnnnnnnnnnnnnnnnnnnnnnnnnnnnnnnnnnnnnnnnnnnnnnnnnnnnnnnnnnnnnnnnnnnnnnnnnnnnnnnnnnnnnnnnnnnnnnnnnnnnnnnnnnnnnnnnnnnnnnnnnnnnnnnnnnnnnnnnnnnnnnnnnnnnnnnnnnnnnnnnnnnnnnnnnnnnnnnnnnnnnnnnnnnnnnnnnnnnnnnnnnnnnnnnnnnnnnnnnnnnnnnnnnnnnnnnnnnnnnnnnnnnnnnnnnnnnnnnnnnnnnnnnnnnnnnnnnnnnnnnnnnnnnnnnnnnnnnnnnnnnnnnnnnnnnnnnnnnnnnnnnnnnnnnnnnnnnnnnnnnnnnnnnnnnnnnnnnnnnnnnnnnnnnnnnnnnnnnnnnnnnnnnnnnnnnnnnnnnnnnnnnnnnnnnnnnnnnnnnnnnnnnnnnnnnnnnnnnnnnnnnnnnnnnnnnnnnnnnnnnnnnnnnnnnnnnnnnnnnnnnnnnnnnnnnnnnnnnnnnnnnnnnnnnnnnnnnnnnnnnnnnnnnnnnnnnnnnnnnnnnnnnnnnnnnnnnnnnnnnnnnnnnnnnnnnnnnnnnnnnnnnnnnnnnnnnnnnnnnnnnnnnnnnnnnnnnnnnnnnnnnnnnnnnnnnnnnnnnnnnnnnnnnnnnnnnnnnnnnnnnnnnnnnnnnnnnnnnnnnnnnnnnnnnnnnnnnnnnnnnnnnnnnnnnnnnnnnnnnnnnnnnnnnnnnnnnnnnnnnnnnnnnnnnnnnnnnnnnnnnnnnnnnnnnnnnnnnnnnnnnnnnnnnnnnnnnnnnnnnnnnnnnnnnnnnnnnnnnnnnnnnnnnnnnnnnnnnnnnnnnnnnnnnnnnnnnnnnnnnnnnnnnnnnnnnnnnnnnnnnnnnnnnnnnnnnnnnnnnnnnnnnnnnnnnnnnnnnnnnnnnnnnnnnnnnnnnnnnnnnnnnnnnnnnnnnnnnnnnnnnnnnnnnnnnnnnnnnnnnnnnnnnnnnnnnnnnnnnnnnnnnnnnnnnnnnnnnnnnnnnnnnnnnnnnnnnnnnnnnnnnnnnnnnnnnnnnnnnnnnnnnnnnnnnnnnnnnnnnnnnnnnnnnnnnnnnnnnnnnnnnnnnnnnnnnnnnnnnnnnnnnnnnnnnnnnnnnnnnnnnnnnnnnnnnnnnnnnnnnnnnnnnnnnnnnnnnnnnnnnnnnnnnnnnnnnnnnnnnnnnnnnnnnnnnnnnnnnnnnnnnnnnnnnnnnnnnnnnnnnnnnnnnnnnnnnnnnnnnnnnnnnnnnnnnnnnnnnnnnnnnnnnnnnnnnnnnnnnnnnnnnnnnnnnnnnnnnnnnnnnnnnnnnnnnnnnnnnnnnnnnnnnnnnnnnnnnnnnnnnnnnnnnnnnnnnnnnnnnnnnnnnnnnnnnnnnnnnnnnnnnnnnnnnnnnnnnnnnnnnnnnnnnnnnnnnnnnnnnnnnnnnnnnnnnnnnnnnnnnnnnnnnnnnnnnnnnnnnnnnnnnnnnnnnnnnnnnnnnnnnnnnnnnnnnnnnnnnnnnnnnnnnnnnnnnnnnnnnnnnnnnnnnnnnnnnnnnnnnnnnnnnnnnnnnnnnnnnnnnnnnnnnnnnnnnnnnnnnnnnnnnnnnnnnnnnnnnnnnnnnnnnnnnnnnnnnnnnnnnnnnnnnnnnnnnnnnnnnnnnnnnnnnnnnnnnnnnnnnnnnnnnnnnnnnnnnnnnnnnnnnnnnnnnnnnnnnnnnnnnnnnnnnnnnnnnnnnnnnnnnnnnnnnnnnnnnnnnnnnnnnnnnnnnnnnnnnnnnnnnnnnnnnnnnnnnnnnnnnnnnnnnnnnnnnnnnnnnnnnnnnnnnnnnnnnnnnnnnnnnnnnnnnnnnnnnnnnnnnnnnnnnnnnnnnnnnnnnnnnnnnnnnnnnnnnnnnnnnnnnnnnnnnnnnnnnnnnnnnnnnnnnnnnnnnnnnnnnnnnnnnnnnnnnnnnnnnnnnnnnnnnnnnnnnnnnnnnnnnnnnnnnnnnnnnnnnnnnnnnnnnnnnnnnnnnnnnnnnnnnnnnnnnnnnnnnnnnnnnnnnnnnnnnnnnnnnnnnnnnnnnnnnnnnnnnnnnnnnnnnnnnnnnnnnnnnnnnnnnnnnnnnnnnnnnnnnnnnnnnnnnnnnnnnnnnnnnnnnnnnnnnnnnnnnnnnnnnnnnnnnnnnnnnnnnnnnnnnnnnnnnnnnnnnnnnnnnnnnnnnnnnnnnnnnnnnnnnnnnnnnnnnnnnnnnnnnnnnnnnnnnnnnnnnnnnnnnnnnnnnnnnnnnnnnnnnnnnnnnnnnnnnnnnnnnnnnnnnnnnnnnnnnnnnnnnnnnnnnnnnnnnnnnnnnnnnnnnnnnnnnnnnnnnnnnnnnnnnnnnnnnnnnnnnnnnnnnnnnnnnnnnnnnnnnnnnnnnnnnnnnnnnnnnnnnnnnnnnnnnnnnnnnnnnnnnnnnnnnnnnnnnnnnnnnnnnnnnnnnnnnnnnnnnnnnnnnnnnnnnnnnnnnnnnnnnnnnnnnnnnnnnnnnnnnnnnnnnnnnnnnnnnnnnnnnnnnnnnnnnnnnnnnnnnnnnnnnnnnnnnnnnnnnnnnnnnnnnnnnnnnnnnnnnnnnnnnnnnnnnnnnnnnnnnnnnnnnnnnnnnnnnnnnnnnnnnnnnnnnnnnnnnnnnnnnnnnnnnnnnnnnnnnnnnnnnnnnnnnnnnnnnnnnnnnnnnnnnnnnnnnnnnnnnnnnnnnnnnnnnnnnnnnnnnnnnnnnnnnnnnnnnnnnnnnnnnnnnnnnnnnnnnnnnnnnnnnnnnnnnnnnnnnnnnnnnnnnnnnnnnnnnnnnnnnnnnnnnnnnnnnnnnnnnnnnnnnnnnnnnnnnnnnnnnnnnnnnnnnnnnnnnnnnnnnnnnnnnnnnnnnnnnnnnnnnnnnnnnnnnnnnnnnnnnnnnnnnnnnnnnnnnnnnnnnnnnnnnnnnnnnnnnnnnnnnnnnnnnnnnnnnnnnnnnnnnnnnnnnnnnnnnnnnnnnnnnnnnnnnnnnnnnnnnnnnnnnnnnnnnnnnnnnnnnnnnnnnnnnnnnnnnnnnnnnnnnnnnnnnnnnnnnnnnnnnnnnnnnnnnnnnnnnnnnnnnnnnnnnnnnnnnnnnnnnnnnnnnnnnnnnnnnnnnnnnnnnnnnnnnnnnnnnnnnnnnnnnnnnnnnnnnnnnnnnnnnnnnnnnnnnnnnnnnnnnnnnnnnnnnnnnnnnnnnnnnnnnnnnnnnnnnnnnnnnnnnnnnnnnnnnnnnnnnnnnnnnnnnnnnnnnnnnnnnnnnnnnnnnnnnnnnnnnnnnnnnnnnnnnnnnnnnnnnnnnnnnnnnnnnnnnnnnnnnnnnnnnnnnnnnnnnnnnnnnnnnnnnnnnnnnnnnnnnnnnnnnnnnnnnnnnnnnnnnnnnnnnnnnnnnnnnnnnnnnnnnnnnnnnnnnnnnnnnnnnnnnnnnnnnnnnnnnnnnnnnnnnnnnnnnnnnnnnnnnnnnnnnnnnnnnnnnnnnnnnnnnnnnnnnnnnnnnnnnnnnnnnnnnnnnnnnnnnnnnnnnnnnnnnnnnnnnnnnnnnnnnnnnnnnnnnnnnnnnnnnnnnnnnnnnnnnnnnnnnnnnnnnnnnnnnnnnnnnnnnnnnnnnnnnnnnnnnnnnnnnnnnnnnnnnnnnnnnnnnnnnnnnnnnnnnnnnnnnnnnnnnnnnnnnnnnnnnnnnnnnnnnnnnnnnnnnnnnnnnnnnnnnnnnnnnnnnnnnnnnnnnnnnnnnnnnnnnnnnnnnnnnnnnnnnnnnnnnnnnnnnnnnnnnnnnnnnnnnnnnnnnnnnnnnnnnnnnnnnnnnnnnnnnnnnnnnnnnnnnnnnnnnnnnnnnnnnnnnnnnnnnnnnnnnnnnnnnnnnnnnnnnnnnnnnnnnnnnnnnnnnnnnnnnnnnnnnnnnnnnnnnnnnnnnnnnnnnnnnnnnnnnnnnnnnnnnnnnnnnnnnnnnnnnnnnnnnnnnnnnnnnnnnnnnnnnnnnnnnnnnnnnnnnnnnnnnnnnnnnnnnnnnnnnnnnnnnnnnnnnnnnnnnnnnnnnnnnnnnnnnnnnnnnnnnnnnnnnnnnnnnnnnnnnnnnnnnnnnnnnnnnnnnnnnnnnnnnnnnnnnnnnnnnnnnnnnnnnnnnnnnnnnnnnnnnnnnnnnnnnnnnnnnnnnnnnnnnnnnnnnnnnnnnnnnnnnnnnnnnnnnnnnnnnnnnnnnnnnnnnnnnnnnnnnnnnnnnnnnnnnnnnnnnnnnnnnnnnnnnnnnnnnnnnnnnnnnnnnnnnnnnnnnnnnnnnnnnnnnnnnnnnnnnnnnnnnnnnnnnnnnnnnnnnnnnnnnnnnnnnnnnnnnnnnnnnnnnnnnnnnnnnnnnnnnnnnnnnnnnnnnnnnnnnnnnnnnnnnnnnnnnnnnnnnnnnnnnnnnnnnnnnnnnnnnnnnnnnnnnnnnnnnnnnnnnnnnnnnnnnnnnnnnnnnnnnnnnnnnnnnnnnnnnnnnnnnnnnnnnnnnnnnnnnnnnnnnnnnnnnnnnnnnnnnnnnnnnnnnnnnnnnnnnnnnnnnnnnnnnnnnnnnnnnnnnnnnnnnnnnnnnnnnnnnnnnnnnnnnnnnnnnnnnnnnnnnnnnnnnnnnnnnnnnnnnnnnnnnnnnnnnnnnnnnnnnnnnnnnnnnnnnnnnnnnnnnnnnnnnnnnnnnnnnnnnnnnnnnnnnnnnnnnnnnnnnnnnnnnnnnnnnnnnnnnnnnnnnnnnnnnnnnnnnnnnnnnnnnnnnnnnnnnnnnnnnnnnnnnnnnnnnnnnnnnnnnnnnnnnnnnnnnnnnnnnnnnnnnnnnnnnnnnnnnnnnnnnnnnnnnnnnnnnnnnnnnnnnnnnnnnnnnnnnnnnnnnnnnnnnnnnnnnnnnnnnnnnnnnnnnnnnnnnnnnnnnnnnnnnnnnnnnnnnnnnnnnnnnnnnnnnnnnnnnnnnnnnnnnnnnnnnnnnnnnnnnnnnnnnnnnnnnnnnnnnnnnnnnnnnnnnnnnnnnnnnnnnnnnnnnnnnnnnnnnnnnnnnnnnnnnnnnnnnnnnnnnnnnnnnnnnnnnnnnnnnnnnnnnnnnnnnnnnnnnnnnnnnnnnnnnnnnnnnnnnnnnnnnnnnnnnnnnnnnnnnnnnnnnnnnnnnnnnnnnnnnnnnnnnnnnnnnnnnnnnnnnnnnnnnnnnnnnnnnnnnnnnnnnnnnnnnnnnnnnnnnnnnnnnnnnnnnnnnnnnnnnnnnnnnnnnnnnnnnnnnnnnnnnnnnnnnnnnnnnnnnnnnnnnnnnnnnnnnnnnnnnnnnnnnnnnnnnnnnnnnnnnnnnnnnnnnnnnnnnnnnnnnnnnnnnnnnnnnnnnnnnnnnnnnnnnnnnnnnnnnnnnnnnnnnnnnnnnnnnnnnnnnnnnnnnnnnnnnnnnnnnnnnnnnnnnnnnnnnnnnnnnnnnnnnnnnnnnnnnnnnnnnnnnnnnnnnnnnnnnnnnnnnnnnnnnnnnnnnnnnnnnnnnnnnnnnnnnnnnnnnnnnnnnnnnnnnnnnnnnnnnnnnnnnnnnnnnnnnnnnnnnnnnnnnnnnnnnnnnnnnnnnnnnnnnnnnnnnnnnnnnnnnnnnnnnnnnnnnnnnnnnnnnnnnnnnnnnnnnnnnnnnnnnnnnnnnnnnnnnnnnnnnnnnnnnnnnnnnnnnnnnnnnnnnnnnnnnnnnnnnnnnnnnnnnnnnnnnnnnnnnnnnnnnnnnnnnnnnnnnnnnnnnnnnnnnnnnnnnnnnnnnnnnnnnnnnnnnnnnnnnnnnnnnnnnnnnnnnnnnnnnnnnnnnnnnnnnnnnnnnnnnnnnnnnnnnnnnnnnnnnnnnnnnnnnnnnnnnnnnnnnnnnnnnnnnnnnnnnnnnnnnnnnnnnnnnnnnnnnnnnnnnnnnnnnnnnnnnnnnnnnnnnnnnnnnnnnnnnnnnnnnnnnnnnnnnnnnnnnnnnnnnnnnnnnnnnnnnnnnnnnnnnnnnnnnnnnnnnnnnnnnnnnnnnnnnnnnnnnnnnnnnnnnnnnnnnnnnnnnnnnnnnnnnnnnnnnnnnnnnnnnnnnnnnnnnnnnnnnnnnnnnnnnnnnnnnnnnnnnnnnnnnnnnnnnnnnnnnnnnnnnnnnnnnnnnnnnnnnnnnnnnnnnnnnnnnnnnnnnnnnnnnnnnnnnnnnnnnnnnnnnnnnnnnnnnnnnnnnnnnnnnnnnnnnnnnnnnnnnnnnnnnnnnnnnnnnnnnnnnnnnnnnnnnnnnnnnnnnnnnnnnnnnnnnnnnnnnnnnnnnnnnnnnnnnnnnnnnnnnnnnnnnnnnnnnnnnnnnnnnnnnnnnnnnnnnnnnnnnnnnnnnnnnnnnnnnnnnnnnnnnnnnnnnnnnnnnnnnnnnnnnnnnnnnnnnnnnnnnnnnnnnnnnnnnnnnnnnnnnnnnnnnnnnnnnnnnnnnnnnnnnnnnnnnnnnnnnnnnnnnnnnnnnnnnnnnnnnnnnnnnnnnnnnnnnnnnnnnnnnnnnnnnnnnnnnnnnnnnnnnnnnnnnnnnnnnnnnnnnnnnnnnnnnnnnnnnnnnnnnnnnnnnnnnnnnnnnnnnnnnnnnnnnnnnnnnnnnnnnnnnnnnnnnnnnnnnnnnnnnnnnnnnnnnnnnnnnnnnnnnnnnnnnnnnnnnnnnnnnnnnnnnnnnnnnnnnnnnnnnnnnnnnnnnnnnnnnnnnnnnnnnnnnnnnnnnnnnnnnnnnnnnnnnnnnnnnnnnnnnnnnnnnnnnnnnnnnnnnnnnnnnnnnnnnnnnnnnnnnnnnnnnnnnnnnnnnnnnnnnnnnnnnnnnnnnnnnnnnnnnnnnnnnnnnnnnnnnnnnnnnnnnnnnnnnnnnnnnnnnnnnnnnnnnnnnnnnnnnnnnnnnnnnnnnnnnnnnnnnnnnnnnnnnnnnnnnnnnnnnnnnnnnnnnnnnnnnnnnnnnnnnnnnnnnnnnnnnnnnnnnnnnnnnnnnnnnnnnnnnnnnnnnnnnnnnnnnnnnnnnnnnnnnnnnnnnnnnnnnnnnnnnnnnnnnnnnnnnnnnnnnnnnnnnnnnnnnnnnnnnnnnnnnnnnnnnnnnnnnnnnnnnnnnnnnnnnnnnnnnnnnnnnnnnnnnnnnnnnnnnnnnnnnnnnnnnnnnnnnnnnnnnnnnnnnnnnnnnnnnnnnnnnnnnnnnnnnnnnnnnnnnnnnnnnnnnnnnnnnnnnnnnnnnnnnnnnnnnnnnnnnnnnnnnnnnnnnnnnnnnnnnnnnnnnnnnnnnnnnnnnnnnnnnnnnnnnnnnnnnnnnnnnnnnnnnnnnnnnnnnnnnnnnnnnnnnnnnnnnnnnnnnnnnnnnnnnnnnnnnnnnnnnnnnnnnnnnnnnnnnnnnnnnnnnnnnnnnnnnnnnnnnnnnnnnnnnnnnnnnnnnnnnnnnnnnnnnnnnnnnnnnnnnnnnnnnnnnnnnnnnnnnnnnnnnnnnnnnnnnnnnnnnnnnnnnnnnnnnnnnnnnnnnnnnnnnnnnnnnnnnnnnnnnnnnnnnnnnnnnnnnnnnnnnnnnnnnnnnnnnnnnnnnnnnnnnnnnnnnnnnnnnnnnnnnnnnnnnnnnnnnnnnnnnnnnnnnnnnnnnnnnnnnnnnnnnnnnnnnnnnnnnnnnnnnnnnnnnnnnnnnnnnnnnnnnnnnnnnnnnnnnnnnnnnnnnnnnnnnnnnnnnnnnnnnnnnnnnnnnnnnnnnnnnnnnnnnnnnnnnnnnnnnnnnnnnnnnnnnnnnnnnnnnnnnnnnnnnnnnnnnnnnnnnnnnnnnnnnnnnnnnnnnnnnnnnnnnnnnnnnnnnnnnnnnnnnnnnnnnnnnnnnnnnnnnnnnnnnnnnnnnnnnnnnnnnnnnnnnnnnnnnnnnnnnnnnnnnnnnnnnnnnnnnnnnnnnnnnnnnnnnnnnnnnnnnnnnnnnnnnnnnnnnnnnnnnnnnnnnnnnnnnnnnnnnnnnnnnnnnnnnnnnnnnnnnnnnnnnnnnnnnnnnnnnnnnnnnnnnnnnnnnnnnnnnnnnnnnnnnnnnnnnnnnnnnnnnnnnnnnnnnnnnnnnnnnnnnnnnnnnnnnnnnnnnnnnnnnnnnnnnnnnnnnnnnnnnnnnnnnnnnnnnnnnnnnnnnnnnnnnnnnnnnnnnnnnnnnnnnnnnnnnnnnnnnnnnnnnnnnnnnnnnnnnnnnnnnnnnnnnnnnnnnnnnnnnnnnnnnnnnnnnnnnnnnnnnnnnnnnnnnnnnnnnnnnnnnnnnnnnnnnnnnnnnnnnnnnnnnnnnnnnnnnnnnnnnnnnnnnnnnnnnnnnnnnnnnnnnnnnnnnnnnnnnnnnnnnnnnnnnnnnnnnnnnnnnnnnnnnnnnnnnnnnnnnnnnnnnnnnnnnnnnnnnnnnnnnnnnnnnnnnnnnnnnnnnnnnnnnnnnnnnnnnnnnnnnnnnnnnnnnnnnnnnnnnnnnnnnnnnnnnnnnnnnnnnnnnnnnnnnnnnnnnnnnnnnnnnnnnnnnnnnnnnnnnnnnnnnnnnnnnnnnnnnnnnnnnnnnnnnnnnnnnnnnnnnnnnnnnnnnnnnnnnnnnnnnnnnnnnnnnnnnnnnnnnnnnnnnnnnnnnnnnnnnnnnnnnnnnnnnnnnnnnnnnnnnnnnnnnnnnnnnnnnnnnnnnnnnnnnnnnnnnnnnnnnnnnnnnnnnnnnnnnnnnnnnnnnnnnnnnnnnnnnnnnnnnnnnnnnnnnnnnnnnnnnnnnnnnnnnnnnnnnnnnnnnnnnnnnnnnnnnnnnnnnnnnnnnnnnnnnnnnnnnnnnnnnnnnnnnnnnnnnnnnnnnnnnnnnnnnnnnnnnnnnnnnnnnnnnnnnnnnnnnnnnnnnnnnnnnnnnnnnnnnnnnnnnnnnnnnnnnnnnnnnnnnnnnnnnnnnnnnnnnnnnnnnnnnnnnnnnnnnnnnnnnnnnnnnnnnnnnnnnnnnnnnnnnnnnnnnnnnnnnnnnnnnnnnnnnnnnnnnnnnnnnnnnnnnnnnnnnnnnnnnnnnnnnnnnnnnnnnnnnnnnnnnnnnnnnnnnnnnnnnnnnnnnnnnnnnnnnnnnnnnnnnnnnnnnnnnnnnnnnnnnnnnnnnnnnnnnnnnnnnnnnnnnnnnnnnnnnnnnnnnnnnnnnnnnnnnnnnnnnnnnnnnnnnnnnnnnnnnnnnnnnnnnnnnnnnnnnnnnnnnnnnnnnnnnnnnnnnnnnnnnnnnnnnnnnnnnnnnnnnnnnnnnnnnnnnnnnnnnnnnnnnnnnnnnnnnnnnnnnnnnnnnnnnnnnnnnnnnnnnnnnnnnnnnnnnnnnnnnnnnnnnnnnnnnnnnnnnnnnnnnnnnnnnnnnnnnnnnnnnnnnnnnnnnnnnnnnnnnnnnnnnnnnnnnnnnnnnnnnnnnnnnnnnnnnnnnnnnnnnnnnnnnnnnnnnnnnnnnnnnnnnnnnnnnnnnnnnnnnnnnnnnnnnnnnnnnnnnnnnnnnnnnnnnnnnnnnnnnnnnnnnnnnnnnnnnnnnnnnnnnnnnnnnnnnnnnnnnnnnnnnnnnnnnnnnnnnnnnnnnnnnnnnnnnnnnnnnnnnnnnnnnnnnnnnnnnnnnnnnnnnnnnnnnnnnnnnnnnnnnnnnnnnnnnnnnnnnnnnnnnnnnnnnnnnnnnnnnnnnnnnnnnnnnnnnnnnnnnnnnnnnnnnnnnnnnnnnnnnnnnnnnnnnnnnnnnnnnnnnnnnnnnnnnnnnnnnnnnnnnnnnnnnnnnnnnnnnnnnnnnnnnnnnnnnnnnnnnnnnnnnnnnnnnnnnnnnnnnnnnnnnnnnnnnnnnnnnnnnnnnnnnnnnnnnnnnnnnnnnnnnnnnnnnnnnnnnnnnnnnnnnnnnnnnnnnnnnnnnnnnnnnnnnnnnnnnnnnnnnnnnnnnnnnnnnnnnnnnnnnnnnnnnnnnnnnnnnnnnnnnnnnnnnnnnnnnnnnnnnnnnnnnnnnnnnnnnnnnnnnnnnnnnnnnnnnnnnnnnnnnnnnnnnnnnnnnnnnnnnnnnnnnnnnnnnnnnnnnnnnnnnnnnnnnnnnnnnnnnnnnnnnnnnnnnnnnnnnnnnnnnnnnnnnnnnnnnnnnnnnnnnnnnnnnnnnnnnnnnnnnnnnnnnnnnnnnnnnnnnnnnnnnnnnnnnnnnnnnnnnnnnnnnnnnnnnnnnnnnnnnnnnnnnnnnnnnnnnnnnnnnnnnnnnnnnnnnnnnnnnnnnnnnnnnnnnnnnnnnnnnnnnnnnnnnnnnnnnnnnnnnnnnnnnnnnnnnnnnnnnnnnnnnnnnnnnnnnnnnnnnnnnnnnnnnnnnnnnnnnnnnnnnnnnnnnnnnnnnnnnnnnnnnnnnnnnnnnnnnnnnnnnnnnnnnnnnnnnnnnnnnnnnnnnnnnnnnnnnnnnnnnnnnnnnnnnnnnnnnnnnnnnnnnnnnnnnnnnnnnnnnnnnnnnnnnnnnnnnnnnnnnnnnnnnnnnnnnnnnnnnnnnnnnnnnnnnnnnnnnnnnnnnnnnnnnnnnnnnnnnnnnnnnnnnnnnnnnnnnnnnnnnnnnnnnnnnnnnnnnnnnnnnnnnnnnnnnnnnnnnnnnnnnnnnnnnnnnnnnnnnnnnnnnnnnnnnnnnnnnnnnnnnnnnnnnnnnnnnnnnnnnnnnnnnnnnnnnnnnnnnnnnnnnnnnnnnnnnnnnnnnnnnnnnnnnnnnnnnnnnnnnnnnnnnnnnnnnnnnnnnnnnnnnnnnnnnnnnnnnnnnnnnnnnnnnnnnnnnnnnnnnnnnnnnnnnnnnnnnnnnnnnnnnnnnnnnnnnnnnnnnnnnnnnnnnnnnnnnnnnnnnnnnnnnnnnnnnnnnnnnnnnnnnnnnnnnnnnnnnnnnnnnnnnnnnnnnnnnnnnnnnnnnnnnnnnnnnnnnnnnnnnnnnnnnnnnnnnnnnnnnnnnnnnnnnnnnnnnnnnnnnnnnnnnnnnnnnnnnnnnnnnnnnnnnnnnnnnnnnnnnnnnnnnnnnnnnnnnnnnnnnnnnnnnnnnnnnnnnnnnnnnnnnnnnnnnnnnnnnnnnnnnnnnnnnnnnnnnnnnnnnnnnnnnnnnnnnnnnnnnnnnnnnnnnnnnnnnnnnnnnnnnnnnnnnnnnnnnnnnnnnnnnnnnnnnnnnnnnnnnnnnnnnnnnnnnnnnnnnnnnnnnnnnnnnnnnnnnnnnnnnnnnnnnnnnnnnnnnnnnnnnnnnnnnnnnnnnnnnnnnnnnnnnnnnnnnnnnnnnnnnnnnnnnnnnnnnnnnnnnnnnnnnnnnnnnnnnnnnnnnnnnnnnnnnnnnnnnnnnnnnnnnnnnnnnnnnnnnnnnnnnnnnnnnnnnnnnnnnnnnnnnnnnnnnnnnnnnnnnnnnnnnnnnnnnnnnnnnnnnnnnnnnnnnnnnnnnnnnnnnnnnnnnnnnnnnnnnnnnnnnnnnnnnnnnnnnnnnnnnnnnnnnnnnnnnnnnnnnnnnnnnnnnnnnnnnnnnnnnnnnnnnnnnnnnnnnnnnnnnnnnnnnnnnnnnnnnnnnnnnnnnnnnnnnnnnnnnnnnnnnnnnnnnnnnnnnnnnnnnnnnnnnnnnnnnnnnnnnnnnnnnnnnnnnnnnnnnnnnnnnnnnnnnnnnnnnnnnnnnnnnnnnnnnnnnnnnnnnnnnnnnnnnnnnnnnnnnnnnnnnnnnnnnnnnnnnnnnnnnnnnnnnnnnnnnnnnnnnnnnnnnnnnnnnnnnnnnnnnnnnnnnnnnnnnnnnnnnnnnnnnnnnnnnnnnnnnnnnnnnnnnnnnnnnnnnnnnnnnnnnnnnnnnnnnnnnnnnnnnnnnnnnnnnnnnnnnnnnnnnnnnnnnnnnnnnnnnnnnnnnnnnnnnnnnnnnnnnnnnnnnnnnnnnnnnnnnnnnnnnnnnnnnnnnnnnnnnnnnnnnnnnnnnnnnnnnnnnnnnnnnnnnnnnnnnnnnnnnnnnnnnnnnnnnnnnnnnnnnnnnnnnnnnnnnnnnnnnnnnnnnnnnnnnnnnnnnnnnnnnnnnnnnnnnnnnnnnnnnnnnnnnnnnnnnnnnnnnnnnnnnnnnnnnnnnnnnnnnnnnnnnnnnnnnnnnnnnnnnnnnnnnnnnnnnnnnnnnnnnnnnnnnnnnnnnnnnnnnnnnnnnnnnnnnnnnnnnnnnnnnnnnnnnnnnnnnnnnnnnnnnnnnnnnnnnnnnnnnnnnnnnnnnnnnnnnnnnnnnnnnnnnnnnnnnnnnnnnnnnnnnnnnnnnnnnnnnnnnnnnnnnnnnnnnnnnnnnnnnnnnnnnnnnnnnnnnnnnnnnnnnnnnnnnnnnnnnnnnnnnnnnnnnnnnnnnnnnnnnnnnnnnnnnnnnnnnnnnnnnnnnnnnnnnnnnnnnnnnnnnnnnnnnnnnnnnnnnnnnnnnnnnnnnnnnnnnnnnnnnnnnnnnnnnnnnnnnnnnnnnnnnnnnnnnnnnnnnnnnnnnnnnnnnnnnnnnnnnnnnnnnnnnnnnnnnnnnnnnnnnnnnnnnnnnnnnnnnnnnnnnnnnnnnnnnnnnnnnnnnnnnnnnnnnnnnnnnnnnnnnnnnnnnnnnnnnnnnnnnnnnnnnnnnnnnnnnnnnnnnnnnnnnnnnnnnnnnnnnnnnnnnnnnnnnnnnnnnnnnnnnnnnnnnnnnnnnnnnnnnnnnnnnnnnnnnnnnnnnnnnnnnnnnnnnnnnnnnnnnnnnnnnnnnnnnnnnnnnnnnnnnnnnnnnnnnnnnnnnnnnnnnnnnnnnnnnnnnnnnnnnnnnnnnnnnnnnnnnnnnnnnnnnnnnnnnnnnnnnnnnnnnnnnnnnnnnnnnnnnnnnnnnnnnnnnnnnnnnnnnnnnnnnnnnnnnnnnnnnnnnnnnnnnnnnnnnnnnnnnnnnnnnnnnnnnnnnnnnnnnnnnnnnnnnnnnnnnnnnnnnnnnnnnnnnnnnnnnnnnnnnnnnnnnnnnnnnnnnnnnnnnnnnnnnnnnnnnnnnnnnnnnnnnnnnnnnnnnnnnnnnnnnnnnnnnnnnnnnnnnnnnnnnnnnnnnnnnnnnnnnnnnnnnnnnnnnnnnnnnnnnnnnnnnnnnnnnnnnnnnnnnnnnnnnnnnnnnnnnnnnnnnnnnnnnnnnnnnnnnnnnnnnnnnnnnnnnnnnnnnnnnnnnnnnnnnnnnnnnnnnnnnnnnnnnnnnnnnnnnnnnnnnnnnnnnnnnnnnnnnnnnnnnnnnnnnnnnnnnnnnnnnnnnnnnnnnnnnnnnnnnnnnnnnnnnnnnnnnnnnnnnnnnnnnnnnnnnnnnnnnnnnnnnnnnnnnnnnnnnnnnnnnnnnnnnnnnnnnnnnnnnnnnnnnnnnnnnnnnnnnnnnnnnnnnnnnnnnnnnnnnnnnnnnnnnnnnnnnnnnnnnnnnnnnnnnnnnnnnnnnnnnnnnnnnnnnnnnnnnnnnnnnnnnnnnnnnnnnnnnnnnnnnnnnnnnnnnnnnnnnnnnnnnnnnnnnnnnnnnnnnnnnnnnnnnnnnnnnnnnnnnnnnnnnnnnnnnnnnnnnnnnnnnnnnnnnnnnnnnnnnnnnnnnnnnnnnnnnnnnnnnnnnnnnnnnnnnnnnnnnnnnnnnnnnnnnnnnnnnnnnnnnnnnnnnnnnnnnnnnnnnnnnnnnnnnnnnnnnnnnnnnnnnnnnnnnnnnnnnnnnnnnnnnnnnnnnnnnnnnnnnnnnnnnnnnnnnnnnnnnnnnnnnnnnnnnnnnnnnnnnnnnnnnnnnnnnnnnnnnnnnnnnnnnnnnnnnnnnnnnnnnnnnnnnnnnnnnnnnnnnnnnnnnnnnnnnnnnnnnnnnnnnnnnnnnnnnnnnnnnnnnnnnnnnnnnnnnnnnnnnnnnnnnnnnnnnnnnnnnnnnnnnnnnnnnnnnnnnnnnnnnnnnnnnnnnnnnnnnnnnnnnnnnnnnnnnnnnnnnnnnnnnnnnnnnnnnnnnnnnnnnnnnnnnnnnnnnnnnnnnnnnnnnnnnnnnnnnnnnnnnnnnnnnnnnnnnnnnnnnnnnnnnnnnnnnnnnnnnnnnnnnnnnnnnnnnnnnnnnnnnnnnnnnnnnnnnnnnnnnnnnnnnnnnnnnnnnnnnnnnnnnnnnnnnnnnnnnnnnnnnnnnnnnnnnnnnnnnnnnnnnnnnnnnnnnnnnnnnnnnnnnnnnnnnnnnnnnnnnnnnnnnnnnnnnnnnnnnnnnnnnnnnnnnnnnnnnnnnnnnnnnnnnnnnnnnnnnnnnnnnnnnnnnnnnnnnnnnnnnnnnnnnnnnnnnnnnnnnnnnnnnnnnnnnnnnnnnnnnnnnnnnnnnnnnnnnnnnnnnnnnnnnnnnnnnnnnnnnnnnnnnnnnnnnnnnnnnnnnnnnnnnnnnnnnnnnnnnnnnnnnnnnnnnnnnnnnnnnnnnnnnnnnnnnnnnnnnnnnnnnnnnnnnnnnnnnnnnnnnnnnnnnnnnnnnnnnnnnnnnnnnnnnnnnnnnnnnnnnnnnnnnnnnnnnnnnnnnnnnnnnnnnnnnnnnnnnnnnnnnnnnnnnnnnnnnnnnnnnnnnnnnnnnnnnnnnnnnnnnnnnnnnnnnnnnnnnnnnnnnnnnnnnnnnnnnnnnnnnnnnnnnnnnnnnnnnnnnnnnnnnnnnnnnnnnnnnnnnnnnnnnnnnnnnnnnnnnnnnnnnnnnnnnnnnnnnnnnnnnnnnnnnnnnnnnnnnnnnnnnnnnnnnnnnnnnnnnnnnnnnnnnnnnnnnnnnnnnnnnnnnnnnnnnnnnnnnnnnnnnnnnnnnnnnnnnnnnnnnnnnnnnnnnnnnnnnnnnnnnnnnnnnnnnnnnnnnnnnnnnnnnnnnnnnnnnnnnnnnnnnnnnnnnnnnnnnnnnnnnnnnnnnnnnnnnnnnnnnnnnnnnnnnnnnnnnnnnnnnnnnnnnnnnnnnnnnnnnnnnnnnnnnnnnnnnnnnnnnnnnnnnnnnnnnnnnnnnnnnnnnnnnnnnnnnnnnnnnnnnnnnnnnnnnnnnnnnnnnnnnnnnnnnnnnnnnnnnnnnnnnnnnnnnnnnnnnnnnnnnnnnnnnnnnnnnnnnnnnnnnnnnnnnnnnnnnnnnnnnnnnnnnnnnnnnnnnnnnnnnnnnnnnnnnnnnnnnnnnnnnnnnnnnnnnnnnnnnnnnnnnnnnnnnnnnnnnnnnnnnnnnnnnnnnnnnnnnnnnnnnnnnnnnnnnnnnnnnnnnnnnnnnnnnnnnnnnnnnnnnnnnnnnnnnnnnnnnnnnnnnnnnnnnnnnnnnnnnnnnnnnnnnnnnnnnnnnnnnnnnnnnnnnnnnnnnnnnnnnnnnnnnnnnnnnnnnnnnnnnnnnnnnnnnnnnnnnnnnnnnnnnnnnnnnnnnnnnnnnnnnnnnnnnnnnnnnnnnnnnnnnnnnnnnnnnnnnnnnnnnnnnnnnnnnnnnnnnnnnnnnnnnnnnnnnnnnnnnnnnnnnnnnnnnnnnnnnnnnnnnnnnnnnnnnnnnnnnnnnnnnnnnnnnnnnnnnnnnnnnnnnnnnnnnnnnnnnnnnnnnnnnnnnnnnnnnnnnnnnnnnnnnnnnnnnnnnnnnnnnnnnnnnnnnnnnnnnnnnnnnnnnnnnnnnnnnnnnnnnnnnnnnnnnnnnnnnnnnnnnnnnnnnnnnnnnnnnnnnnnnnnnnnnnnnnnnnnnnnnnnnnnnnnnnnnnnnnnnnnnnnnnnnnnnnnnnnnnnnnnnnnnnnnnnnnnnnnnnnnnnnnnnnnnnnnnnnnnnnnnnnnnnnnnnnnnnnnnnnnnnnnnnnnnnnnnnnnnnnnnnnnnnnnnnnnnnnnnnnnnnnnnnnnnnnnnnnnnnnnnnnnnnnnnnnnnnnnnnnnnnnnnnnnnnnnnnnnnnnnnnnnnnnnnnnnnnnnnnnnnnnnnnnnnnnnnnnnnnnnnnnnnnnnnnnnnnnnnnnnnnnnnnnnnnnnnnnnnnnnnnnnnnnnnnnnnnnnnnnnnnnnnnnnnnnnnnnnnnnnnnnnnnnnnnnnnnnnnnnnnnnnnnnnnnnnnnnnnnnnnnnnnnnnnnnnnnnnnnnnnnnnnnnnnnnnnnnnnnnnnnnnnnnnnnnnnnnnnnnnnnnnnnnnnnnnnnnnnnnnnnnnnnnnnnnnnnnnnnnnnnnnnnnnnnnnnnnnnnnnnnnnnnnnnnnnnnnnnnnnnnnnnnnnnnnnnnnnnnnnnnnnnnnnnnnnnnnnnnnnnnnnnnnnnnnnnnnnnnnnnnnnnnnnnnnnnnnnnnnnnnnnnnnnnnnnnnnnnnnnnnnnnnnnnnnnnnnnnnnnnnnnnnnnnnnnnnnnnnnnnnnnnnnnnnnnnnnnnnnnnnnnnnnnnnnnnnnnnnnnnnnnnnnnnnnnnnnnnnnnnnnnnnnnnnnnnnnnnnnnnnnnnnnnnnnnnnnnnnnnnnnnnnnnnnnnnnnnnnnnnnnnnnnnnnnnnnnnnnnnnnnnnnnnnnnnnnnnnnnnnnnnnnnnnnnnnnnnnnnnnnnnnnnnnnnnnnnnnnnnnnnnnnnnnnnnnnnnnnnnnnnnnnnnnnnnnnnnnnnnnnnnnnnnnnnnnnnnnnnnnnnnnnnnnnnnnnnnnnnnnnnnnnnnnnnnnnnnnnnnnnnnnnnnnnnnnnnnnnnnnnnnnnnnnnnnnnnnnnnnnnnnnnnnnnnnnnnnnnnnnnnnnnnnnnnnnnnnnnnnnnnnnnnnnnnnnnnnnnnnnnnnnnnnnnnnnnnnnnnnnnnnnnnnnnnnnnnnnnnnnnnnnnnnnnnnnnnnnnnnnnnnnnnnnnnnnnnnnnnnnnnnnnnnnnnnnnnnnnnnnnnnnnnnnnnnnnnnnnnnnnnnnnnnnnnnnnnnnnnnnnnnnnnnnnnnnnnnnnnnnnnnnnnnnnnnnnnnnnnnnnnnnnnnnnnnnnnnnnnnnnnnnnnnnnnnnnnnnnnnnnnnnnnnnnnnnnnnnnnnnnnnnnnnnnnnnnnnnnnnnnnnnnnnnnnnnnnnnnnnnnnnnnnnnnnnnnnnnnnnnnnnnnnnnnnnnnnnnnnnnnnnnnnnnnnnnnnnnnnnnnnnnnnnnnnnnnnnnnnnnnnnnnnnnnnnnnnnnnnnnnnnnnnnnnnnnnnnnnnnnnnnnnnnnnnnnnnnnnnnnnnnnnnnnnnnnnnnnnnnnnnnnnnnnnnnnnnnnnnnnnnnnnnnnnnnnnnnnnnnnnnnnnnnnnnnnnnnnnnnnnnnnnnnnnnnnnnnnnnnnnnnnnnnnnnnnnnnnnnnnnnnnnnnnnnnnnnnnnnnnnnnnnnnnnnnnnnnnnnnnnnnnnnnnnnnnnnnnnnnnnnnnnnnnnnnnnnnnnnnnnnnnnnnnnnnnnnnnnnnnnnnnnnnnnnnnnnnnnnnnnnnnnnnnnnnnnnnnnnnnnnnnnnnnnnnnnnnnnnnnnnnnnnnnnnnnnnnnnnnnnnnnnnnnnnnnnnnnnnnnnnnnnnnnnnnnnnnnnnnnnnnnnnnnnnnnnnnnnnnnnnnnnnnnnnnnnnnnnnnnnnnnnnnnnnnnnnnnnnnnnnnnnnnnnnnnnnnnnnnnnnnnnnnnnnnnnnnnnnnnnnnnnnnnnnnnnnnnnnnnnnnnnnnnnnnnnnnnnnnnnnnnnnnnnnnnnnnnnnnnnnnnnnnnnnnnnnnnnnnnnnnnnnnnnnnnnnnnnnnnnnnnnnnnnnnnnnnnnnnnnnnnnnnnnnnnnnnnnnnnnnnnnnnnnnnnnnnnnnnnnnnnnnnnnnnnnnnnnnnnnnnnnnnnnnnnnnnnnnnnnnnnnnnnnnnnnnnnnnnnnnnnnnnnnnnnnnnnnnnnnnnnnnnnnnnnnnnnnnnnnnnnnnnnnnnnnnnnnnnnnnnnnnnnnnnnnnnnnnnnnnnnnnnnnnnnnnnnnnnnnnnnnnnnnnnnnnnnnnnnnnnnnnnnnnnnnnnnnnnnnnnnnnnnnnnnnnnnnnnnnnnnnnnnnnnnnnnnnnnnnnnnnnnnnnnnnnnnnnnnnnnnnnnnnnnnnnnnnnnnnnnnnnnnnnnnnnnnnnnnnnnnnnnnnnnnnnnnnnnnnnnnnnnnnnnnnnnnnnnnnnnnnnnnnnnnnnnnnnnnnnnnnnnnnnnnnnnnnnnnnnnnnnnnnnnnnnnnnnnnnnnnnnnnnnnnnnnnnnnnnnnnnnnnnnnnnnnnnnnnnnnnnnnnnnnnnnnnnnnnnnnnnnnnnnnnnnnnnnnnnnnnnnnnnnnnnnnnnnnnnnnnnnnnnnnnnnnnnnnnnnnnnnnnnnnnnnnnnnnnnnnnnnnnnnnnnnnnnnnnnnnnnnnnnnnnnnnnnnnnnnnnnnnnnnnnnnnnnnnnnnnnnnnnnnnnnnnnnnnnnnnnnnnnnnnnnnnnnnnnnnnnnnnnnnnnnnnnnnnnnnnnnnnnnnnnnnnnnnnnnnnnnnnnnnnnnnnnnnnnnnnnnnnnnnnnnnnnnnnnnnnnnnnnnnnnnnnnnnnnnnnnnnnnnnnnnnnnnnnnnnnnnnnnnnnnnnnnnnnnnnnnnnnnnnnnnnnnnnnnnnnnnnnnnnnnnnnnnnnnnnnnnnnnnnnnnnnnnnnnnnnnnnnnnnnnnnnnnnnnnnnnnnnnnnnnnnnnnnnnnnnnnnnnnnnnnnnnnnnnnnnnnnnnnnnnnnnnnnnnnnnnnnnnnnnnnnnnnnnnnnnnnnnnnnnnnnnnnnnnnnnnnnnnnnnnnnnnnnnnnnnnnnnnnnnnnnnnnnnnnnnnnnnnnnnnnnnnnnnnnnnnnnnnnnnnnnnnnnnnnnnnnnnnnnnnnnnnnnnnnnnnnnnnnnnnnnnnnnnnnnnnnnnnnnnnnnnnnnnnnnnnnnnnnnnnnnnnnnnnnnnnnnnnnnnnnnnnnnnnnnnnnnnnnnnnnnnnnnnnnnnnnnnnnnnnnnnnnnnnnnnnnnnnnnnnnnnnnnnnnnnnnnnnnnnnnnnnnnnnnnnnnnnnnnnnnnnnnnnnnnnnnnnnnnnnnnnnnnnnnnnnnnnnnnnnnnnnnnnnnnnnnnnnnnnnnnnnnnnnnnnnnnnnnnnnnnnnnnnnnnnnnnnnnnnnnnnnnnnnnnnnnnnnnnnnnnnnnnnnnnnnnnnnnnnnnnnnnnnnnnnnnnnnnnnnnnnnnnnnnnnnnnnnnnnnnnnnnnnnnnnnnnnnnnnnnnnnnnnnnnnnnnnnnnnnnnnnnnnnnnnnnnnnnnnnnnnnnnnnnnnnnnnnnnnnnnnnnnnnnnnnnnnnnnnnnnnnnnnnnnnnnnnnnnnnnnnnnnnnnnnnnnnnnnnnnnnnnnnnnnnnnnnnnnnnnnnnnnnnnnnnnnnnnnnnnnnnnnnnnnnnnnnnnnnnnnnnnnnnnnnnnnnnnnnnnnnnnnnnnnnnnnnnnnnnnnnnnnnnnnnnnnnnnnnnnnnnnnnnnnnnnnnnnnnnnnnnnnnnnnnnnnnnnnnnnnnnnnnnnnnnnnnnnnnnnnnnnnnnnnnnnnnnnnnnnnnnnnnnnnnnnnnnnnnnnnnnnnnnnnnnnnnnnnnnnnnnnnnnnnnnnnnnnnnnnnnnnnnnnnnnnnnnnnnnnnnnnnnnnnnnnnnnnnnnnnnnnnnnnnnnnnnnnnnnnnnnnnnnnnnnnnnnnnnnnnnnnnnnnnnnnnnnnnnnnnnnnnnnnnnnnnnnnnnnnnnnnnnnnnnnnnnnnnnnnnnnnnnnnnnnnnnnnnnnnnnnnnnnnnnnnnnnnnnnnnnnnnnnnnnnnnnnnnnnnnnnnnnnnnnnnnnnnnnnnnnnnnnnnnnnnnnnnnnnnnnnnnnnnnnnnnnnnnnnnnnnnnnnnnnnnnnnnnnnnnnnnnnnnnnnnnnnnnnnnnnnnnnnnnnnnnnnnnnnnnnnnnnnnnnnnnnnnnnnnnnnnnnnnnnnnnnnnnnnnnnnnnnnnnnnnnnnnnnnnnnnnnnnnnnnnnnnnnnnnnnnnnnnnnnnnnnnnnnnnnnnnnnnnnnnnnnnnnnnnnnnnnnnnnnnnnnnnnnnnnnnnnnnnnnnnnnnnnnnnnnnnnnnnnnnnnnnnnnnnnnnnnnnnnnnnnnnnnnnnnnnnnnnnnnnnnnnnnnnnnnnnnnnnnnnnnnnnnnnnnnnnnnnnnnnnnnnnnnnnnnnnnnnnnnnnnnnnnnnnnnnnnnnnnnnnnnnnnnnnnnnnnnnnnnnnnnnnnnnnnnnnnnnnnnnnnnnnnnnnnnnnnnnnnnnnnnnnnnnnnnnnnnnnnnnnnnnnnnnnnnnnnnnnnnnnnnnnnnnnnnnnnnnnnnnnnnnnnnnnnnnnnnnnnnnnnnnnnnnnnnnnnnnnnnnnnnnnnnnnnnnnnnnnnnnnnnnnnnnnnnnnnnnnnnnnnnnnnnnnnnnnnnnnnnnnnnnnnnnnnnnnnnnnnnnnnnnnnnnnnnnnnnnnnnnnnnnnnnnnnnnnnnnnnnnnnnnnnnnnnnnnnnnnnnnnnnnnnnnnnnnnnnnnnnnnnnnnnnnnnnnnnnnnnnnnnnnnnnnnnnnnnnnnnnnnnnnnnnnnnnnnnnnnnnnnnnnnnnnnnnnnnnnnnnnnnnnnnnnnnnnnnnnnnnnnnnnnnnnnnnnnnnnnnnnnnnnnnnnnnnnnnnnnnnnnnnnnnnnnnnnnnnnnnnnnnnnnnnnnnnnnnnnnnnnnnnnnnnnnnnnnnnnnnnnnnnnnnnnnnnnnnnnnnnnnnnnnnnnnnnnnnnnnnnnnnnnnnnnnnnnnnnnnnnnnnnnnnnnnnnnnnnnnnnnnnnnnnnnnnnnnnnnnnnnnnnnnnnnnnnnnnnnnnnnnnnnnnnnnnnnnnnnnnnnnnnnnnnnnnnnnnnnnnnnnnnnnnnnnnnnnnnnnnnnnnnnnnnnnnnnnnnnnnnnnnnnnnnnnnnnnnnnnnnnnnnnnnnnnnnnnnnnnnnnnnnnnnnnnnnnnnnnnnnnnnnnnnnnnnnnnnnnnnnnnnnnnnnnnnnnnnnnnnnnnnnnnnnnnnnnnnnnnnnnnnnnnnnnnnnnnnnnnnnnnnnnnnnnnnnnnnnnnnnnnnnnnnnnnnnnnnnnnnnnnnnnnnnnnnnnnnnnnnnnnnnnnnnnnnnnnnnnnnnnnnnnnnnnnnnnnnnnnnnnnnnnnnnnnnnnnnnnnnnnnnnnnnnnnnnnnnnnnnnnnnnnnnnnnnnnnnnnnnnnnnnnnnnnnnnnnnnnnnnnnnnnnnnnnnnnnnnnnnnnnnnnnnnnnnnnnnnnnnnnnnnnnnnnnnnnnnnnnnnnnnnnnnnnnnnnnnnnnnnnnnnnnnnnnnnnnnnnnnnnnnnnnnnnnnnnnnnnnnnnnnnnnnnnnnnnnnnnnnnnnnnnnnnnnnnnnnnnnnnnnnnnnnnnnnnnnnnnnnnnnnnnnnnnnnnnnnnnnnnnnnnnnnnnnnnnnnnnnnnnnnnnnnnnnnnnnnnnnnnnnnnnnnnnnnnnnnnnnnnnnnnnnnnnnnnnnnnnnnnnnnnnnnnnnnnnnnnnnnnnnnnnnnnnnnnnnnnnnnnnnnnnnnnnnnnnnnnnnnnnnnnnnnnnnnnnnnnnnnnnnnnnnnnnnnnnnnnnnnnnnnnnnnnnnnnnnnnnnnnnnnnnnnnnnnnnnnnnnnnnnnnnnnnnnnnnnnnnnnnnnnnnnnnnnnnnnnnnnnnnnnnnnnnnnnnnnnnnnnnnnnnnnnnnnnnnnnnnnnnnnnnnnnnnnnnnnnnnnnnnnnnnnnnnnnnnnnnnnnnnnnnnnnnnnnnnnnnnnnnnnnnnnnnnnnnnnnnnnnnnnnnnnnnnnnnnnnnnnnnnnnnnnnnnnnnnnnnnnnnnnnnnnnnnnnnnnnnnnnnnnnnnnnnnnnnnnnnnnnnnnnnnnnnnnnnnnnnnnnnnnnnnnnnnnnnnnnnnnnnnnnnnnnnnnnnnnnnnnnnnnnnnnnnnnnnnnnnnnnnnnnnnnnnnnnnnnnnnnnnnnnnnnnnnnnnnnnnnnnnnnnnnnnnnnnnnnnnnnnnnnnnnnnnnnnnnnnnnnnnnnnnnnnnnnnnnnnnnnnnnnnnnnnnnnnnnnnnnnnnnnnnnnnnnnnnnnnnnnnnnnnnnnnnnnnnnnnnnnnnnnnnnnnnnnnnnnnnnnnnnnnnnnnnnnnnnnnnnnnnnnnnnnnnnnnnnnnnnnnnnnnnnnnnnnnnnnnnnnnnnnnnnnnnnnnnnnnnnnnnnnnnnnnnnnnnnnnnnnnnnnnnnnnnnnnnnnnnnnnnnnnnnnnnnnnnnnnnnnnnnnnnnnnnnnnnnnnnnnnnnnnnnnnnnnnnnnnnnnnnnnnnnnnnnnnnnnnnnnnnnnnnnnnnnnnnnnnnnnnnnnnnnnnnnnnnnnnnnnnnnnnnnnnnnnnnnnnnnnnnnnnnnnnnnnnnnnnnnnnnnnnnnnnnnnnnnnnnnnnnnnnnnnnnnnnnnnnnnnnnnnnnnnnnnnnnnnnnnnnnnnnnnnnnnnnnnnnnnnnnnnnnnnnnnnnnnnnnnnnnnnnnnnnnnnnnnnnnnnnnnnnnnnnnnnnnnnnnnnnnnnnnnnnnnnnnnnnnnnnnnnnnnnnnnnnnnnnnnnnnnnnnnnnnnnnnnnnnnnnnnnnnnnnnnnnnnnnnnnnnnnnnnnnnnnnnnnnnnnnnnnnnnnnnnnnnnnnnnnnnnnnnnnnnnnnnnnnnnnnnnnnnnnnnnnnnnnnnnnnnnnnnnnnnnnnnnnnnnnnnnnnnnnnnnnnnnnnnnnnnnnnnnnnnnnnnnnnnnnnnnnnnnnnnnnnnnnnnnnnnnnnnnnnnnnnnnnnnnnnnnnnnnnnnnnnnnnnnnnnnnnnnnnnnnnnnnnnnnnnnnnnnnnnnnnnnnnnnnnnnnnnnnnnnnnnnnnnnnnnnnnnnnnnnnnnnnnnnnnnnnnnnnnnnnnnnnnnnnnnnnnnnnnnnnnnnnnnnnnnnnnnnnnnnnnnnnnnnnnnnnnnnnnnnnnnnnnnnnnnnnnnnnnnnnnnnnnnnnnnnnnnnnnnnnnnnnnnnnnnnnnnnnnnnnnnnnnnnnnnnnnnnnnnnnnnnnnnnnnnnnnnnnnnnnnnnnnnnnnnnnnnnnnnnnnnnnnnnnnnnnnnnnnnnnnnnnnnnnnnnnnnnnnnnnnnnnnnnnnnnnnnnnnnnnnnnnnnnnnnnnnnnnnnnnnnnnnnnnnnnnnnnnnnnnnnnnnnnnnnnnnnnnnnnnnnnnnnnnnnnnnnnnnnnnnnnnnnnnnnnnnnnnnnnnnnnnnnnnnnnnnnnnnnnnnnnnnnnnnnnnnnnnnnnnnnnnnnnnnnnnnnnnnnnnnnnnnnnnnnnnnnnnnnnnnnnnnnnnnnnnnnnnnnnnnnnnnnnnnnnnnnnnnnnnnnnnnnnnnnnnnnnnnnnnnnnnnnnnnnnnnnnnnnnnnnnnnnnnnnnnnnnnnnnnnnnnnnnnnnnnnnnnnnnnnnnnnnnnnnnnnnnnnnnnnnnnnnnnnnnnnnnnnnnnnnnnnnnnnnnnnnnnnnnnnnnnnnnnnnnnnnnnnnnnnnnnnnnnnnnnnnnnnnnnnnnnnnnnnnnnnnnnnnnnnnnnnnnnnnnnnnnnnnnnnnnnnnnnnnnnnnnnnnnnnnnnnnnnnnnnnnnnnnnnnnnnnnnnnnnnnnnnnnnnnnnnnnnnnnnnnnnnnnnnnnnnnnnnnnnnnnnnnnnnnnnnnnnnnnnnnnnnnnnnnnnnnnnnnnnnnnnnnnnnnnnnnnnnnnnnnnnnnnnnnnnnnnnnnnnnnnnnnnnnnnnnnnnnnnnnnnnnnnnnnnnnnnnnnnnnnnnnnnnnnnnnnnnnnnnnnnnnnnnnnnnnnnnnnnnnnnnnnnnnnnnnnnnnnnnnnnnnnnnnnnnnnnnnnnnnnnnnnnnnnnnnnnnnnnnnnnnnnnnnnnnnnnnnnnnnnnnnnnnnnnnnnnnnnnnnnnnnnnnnnnnnnnnnnnnnnnnnnnnnnnnnnnnnnnnnnnnnnnnnnnnnnnnnnnnnnnnnnnnnnnnnnnnnnnnnnnnnnnnnnnnnnnnnnnnnnnnnnnnnnnnnnnnnnnnnnnnnnnnnnnnnnnnnnnnnnnnnnnnnnnnnnnnnnnnnnnnnnnnnnnnnnnnnnnnnnnnnnnnnnnnnnnnnnnnnnnnnnnnnnnnnnnnnnnnnnnnnnnnnnnnnnnnnnnnnnnnnnnnnnnnnnnnnnnnnnnnnnnnnnnnnnnnnnnnnnnnnnnnnnnnnnnnnnnnnnnnnnnnnnnnnnnnnnnnnnnnnnnnnnnnnnnnnnnnnnnnnnnnnnnnnnnnnnnnnnnnnnnnnnnnnnnnnnnnnnnnnnnnnnnnnnnnnnnnnnnnnnnnnnnnnnnnnnnnnnnnnnnnnnnnnnnnnnnnnnnnnnnnnnnnnnnnnnnnnnnnnnnnnnnnnnnnnnnnnnnnnnnnnnnnnnnnnnnnnnnnnnnnnnnnnnnnnnnnnnnnnnnnnnnnnnnnnnnnnnnnnnnnnnnnnnnnnnnnnnnnnnnnnnnnnnnnnnnnnnnnnnnnnnnnnnnnnnnnnnnnnnnnnnnnnnnnnnnnnnnnnnnnnnnnnnnnnnnnnnnnnnnnnnnnnnnnnnnnnnnnnnnnnnnnnnnnnnnnnnnnnnnnnnnnnnnnnnnnnnnnnnnnnnnnnnnnnnnnnnnnnnnnnnnnnnnnnnnnnnnnnnnnnnnnnnnnnnnnnnnnnnnnnnnnnnnnnnnnnnnnnnnnnnnnnnnnnnnnnnnnnnnnnnnnnnnnnnnnnnnnnnnnnnnnnnnnnnnnnnnnnnnnnnnnnnnnnnnnnnnnnnnnnnnnnnnnnnnnnnnnnnnnnnnnnnnnnnnnnnnnnnnnnnnnnnnnnnnnnnnnnnnnnnnnnnnnnnnnnnnnnnnnnnnnnnnnnnnnnnnnnnnnnnnnnnnnnnnnnnnnnnnnnnnnnnnnnnnnnnnnnnnnnnnnnnnnnnnnnnnnnnnnnnnnnnnnnnnnnnnnnnnnnnnnnnnnnnnnnnnnnnnnnnnnnnnnnnnnnnnnnnnnnnnnnnnnnnnnnnnnnnnnnnnnnnnnnnnnnnnnnnnnnnnnnnnnnnnnnnnnnnnnnnnnnnnnnnnnnnnnnnnnnnnnnnnnnnnnnnnnnnnnnnnnnnnnnnnnnnnnnnnnnnnnnnnnnnnnnnnnnnnnnnnnnnnnnnnnnnnnnnnnnnnnnnnnnnnnnnnnnnnnnnnnnnnnnnnnnnnnnnnnnnnnnnnnnnnnnnnnnnnnnnnnnnnnnnnnnnnnnnnnnnnnnnnnnnnnnnnnnnnnnnnnnnnnnnnnnnnnnnnnnnnnnnnnnnnnnnnnnnnnnnnnnnnnnnnnnnnnnnnnnnnnnnnnnnnnnnnnnnnnnnnnnnnnnnnnnnnnnnnnnnnnnnnnnnnnnnnnnnnnnnnnnnnnnnnnnnnnnnnnnnnnnnnnnnnnnnnnnnnnnnnnnnnnnnnnnnnnnnnnnnnnnnnnnnnnnnnnnnnnnnnnnnnnnnnnnnnnnnnnnnnnnnnnnnnnnnnnnnnnnnnnnnnnnnnnnnnnnnnnnnnnnnnnnnnnnnnnnnnnnnnnnnnnnnnnnnnnnnnnnnnnnnnnnnnnnnnnnnnnnnnnnnnnnnnnnnnnnnnnnnnnnnnnnnnnnnnnnnnnnnnnnnnnnnnnnnnnnnnnnnnnnnnnnnnnnnnnnnnnnnnnnnnnnnnnnnnnnnnnnnnnnnnnnnnnnnnnnnnnnnnnnnnnnnnnnnnnnnnnnnnnnnnnnnnnnnnnnnnnnnnnnnnnnnnnnnnnnnnnnnnnnnnnnnnnnnnnnnnnnnnnnnnnnccagaagagcttgccatccaccatctggatggtggggttgccgagcaccacccggctgccgagggcaaagtcctcgcccagcttcttggcggccaaatccttggcgaaagcggaatccaggatcggcacctgatccagattgaccggcgccacaaggtcggaaaactcggtcttttccacctcgccgatcatgcggcggtagctgccggaattgaagatgccggaagagaagaagggcgccaggatcagccacagcgccagaaggggatagaccacatagagtatcttgcgcaggcgccggattgccagcagcggagccaggcagatcatcagggggacgatccagtccaaaaaacggatatgcaacaccggaagcacaaagtaaagcataaaacccagcagcagaatggccagcactatggcaggcagggctttgatcctgagcttgggaaactgaatcacgacaggtttgggcgtttgttgttgaaacatggtaacctccctgaactaagctttgttttgatactatgccagatggcggcggatttgtcaagccggaatcgtggccgcctccactggcagaatggaaaaaagtggactcggctcgaacggcaccctatccttgcggatacagaggcgcgaccgcccgctcaaacactccctgaaccttggaaatagccagcccgtaattggtgatcggcactccgcgccgctgggcttccacgatgcggcggctcatctccatctggttgagcatgcaagccccgcagtggatcaccagcgcgaagtcctccagattgggcgggaagtcgtgtcccgcgtacacttcatactccagttccttgcccgtgaactggctcagccagcgcggaatcttcacccgcccgatgtcgtccgcctgcacgtggtgggaacaggcttcggcgatcaggatcttgtcgccgtcgcgcagcttgtcgatctgcctcaccccttccgccaggacgtccagatcgcccttgtagcgggcaaagaggatggaaaaggtggtcatcttcacctcggggggcaggtcattcaccaccttcagcaccacctgcgaatccgtgatcaccagatcaggcggttccttcagggtttgcagggcataggccagttcccgctctttcaccaccgtcaccaccgcgtcgtgatccagcagttcgcgaatcacctgcacctgcggcaggatcaggcgtcccttgggcgcggcgaggtcgatgggagtcaccagcagcaccctgtccccggccttcaccaggtcacccgccagggggcgttcctccagcagatgggcgggcgccagcttgatcagcagttccttggcggcgtcgatgttttcccccttgagggcggagacggagacccagggcaggccccgttcctcgcaccaggcgatattggcgggggcaggctcgcgcagatccctgtggttaaagaccattaaaagcggtatcttcatctcgcggatgcgcttcagggaggacagctcgctctccgcgaaggggcggccatcgttcacaaacacggctatgtccgtgcggtaaagtatcttataggtggcgagcacccgtttttcgcccagttcgccgctgtcgtccagtccggcggtgtcaaagaaggtcaccgggcccaggggcagcagttcatagcgtttgtccaccgggtctgtggtggtgcccggggtgctggaaacgatggcgatctcctgtcctgccagggcgttgatcaaggacgattttccggcgttgcggttacccaacagggtgatgttgacgcgttcaccgcggggtgtgctcatctatcttctcccaaaaagtcttgcggctcgcggccgctaatagcttttattatcagttctttcatgtttctttccttgtcgggctggataccagcccatgtaaaataatatatgtgaaaagcgtaaatctgtcaagcaaagagaattctggcagacggtagccagtgcccaggggtggcaaagtccgtttgccacagagaccggaggtctcttccaaacaggcaactccgttgcctctgccgaacagacttcggcagcccagaaacaaagcacaactgaccaaaaaacgtgtcatcacggcctgcgagccgtgatccagtcttttaaaatatccacaaattacacaaattaacacgaattatcagaagtggaaaggtggaatggtgaaaaggttcccccgtaacaagtcccaccaagctatacaccgtgtcatcacgggaagtcggggccccctctggggtggcttacccgtgatccagtcttttagaaacaaccacccaaccccgaaacagaccatcgcagacaaaaaaaccgtgtcatcccgggcagcgacccgggatccagtcttttcggaacaaccacccaaccccgaaacaaaacataccagaccaacaagcgtgtcatcacgggcttgacccgtgatccagtcttttcggaacaaccaccaaaccccaaaacagaccacgacagacccaaaaaccgtgtcatcacgggcttgacccgtgatccagtcttttaaggaacatccgcgtaaggttataaaaaaacagccaccatttcacctttccacctttccacctcaaaacacctttccaccaacaatccccccatatatataggtgctacgaccccttaatgccaggcgggaagcggaacccagggcaagtatataaatatacttgcccataattgcgcggccatgagctggctgtcctccatttcccctcgcgcgcgggtggctctcatttgcatccgtcgttttggcgtgagtcttccttaggtcatccttataatttataaggatgacctaaggaagatggcttaacctcctgtggcagtgaaggatggcgctatgaaggatattgcggaaggtacaggtttatttatgcggttgtcaaggaattgatgccggttgtttccagactggctggttattttaaaagactggatcacgggtcaagcatgcgcttgcccgtgatgacacggttttggggtttggtggggcttgttttgggctgcgtccacaatcaacacggcaccacgagagtctatctggggctcctttccaccatttcacctttacacggatttcacaagagaatgtcagatcacaaatagcataaaacagcttgatgaaagcgaattggtatgagccgtgatccagccttttagaagcaaccacccagccccgcaacaaaccactatcagaccaaaaagcgtgtcatcacgggctgtcggggtccccgccaaagcgcgcagcggtttggtggggtgacttgacccgtgatccagtctttcagaaacaacggattacaatgatatagataaatgaacgggcagccgcccttccaagtccgataactaaagaaccgccgcgcattacacacggcggttctttcccgcaaatgggttcaaaaggcgtttccgcctcagttcagagcgcttacccgatagaacctgaacgagttgcccgcctggatttcacaactgaccaggccgtcgccggcggtggggtcgtggacggcggatgtcagcacggtaaagggcccggtgggagccggagccgaataaacgcggtaaaatacggcgttgggcacttctgtccacgtcaggttcagggctgaaactccctttgtgaaggaaactattaccggcgaggtcaaagccgaaccctcgccaaagatgatctgcctgccccagacaccgtccagatatggccgccagatgccgatttggtatgggttgacagtttggttggtcaccagattggcgttggcgaggctgccattgaaataccattgcgccgggcccagttcggagaccagttggcagccctgttcggtgttgatggttcccgcgttgcgcacatattgatcggttgtgccgttcaccagtagccggcgaacgccgatcgtcccgtaattatagaggtcgccgcggatctgggtttcaagatatcctccgtgggtatggctccggatcgtgccatagttttccaacttctgggtaacgctgaaggtcgggtaatagttcatataattgaacagggtggcgttattgatgagtgttcccaccgtgacggtccctatcagtgcgaactcgccgtaagtgattatatggtcggcactgacgttttccaggtagacactgttcagattcagggcgccgcttgctccgcccgagatggccgcgttccggatgcttccgccggactggttgagcgtgaaacattcatccgcggcattgtagagattgatctggttgccgctgaaatcgatggtggtgccgctgaacctgaggttggaaatcaatcgggcgggccctgtggaactggaagtaaagttggtgcaggtgatcgccggagcgtccgtgctctgccagaggtggtggatttgcgatcctgccaggtgggtcaggtggttgttgagcgtcccgtaattgtagatgccgccgtaaagggtaagttctaaacgtgctccatgggtatggttccggatcgtgccatggttgtccagccgctccatgacgctcaggtatcctatttggtctattttattatagacctcgccgttgttgatcaggtgtccgacattcaggttgcctgcgatttccaccataccctgcaatacgatctcgtccgccgctgaattcttcaggaagaaaccgtcgtggcaagtgatgctggctccgttgccgcccacgatctgggcgtcctgcagaaacgtcatgccaccatatccatagcagattatatggtggacggaactgccgttcagcacaagggaggcgttgttcatcctgatgctggtgcctgacgagaccaccagatccgtatccaataccaaggggctgccgggataaagatcctctaagaatttcgggcagaaagtccctgaattgctcagatgctgtgcgttcgtcccgctcaggttcagatgccagggtgtcagggagccagaattggtaatggcgttcgccaccgtgaccgtaagggttcccggatagtagccccaacgatagctggtggttgtgccgtgatttgtcaggctgccattgactatgacctcggtttgggagttaccccccgggttcaacaaccatccggtaccactgaccgtcaggttggcgcactgatggggagaacccgtggtgtccgcgtaaacggtgctgttgataactacatcatccccggagttgggcacccttccgccagcccaggccgcggggtcgctccaatagccgccggcatctgaagaatagacggtcagggccatgatctggcccagtaaagaaagtaaaaacaatactgctaaagcgtttttcataataaactcctttggttggctttcatagacaggctgtttaattacgtcaagagaattgttgagcccgtcacgattgactcagggtcttgtcgagacaacaatgcttccaggtcattttgtcaggcataatgccgtccatgctgaatgattcattgttaatgtccgggcaaatcgacagagtgacggggtttgaggttttcggtggcgggtttatatagggagacctccctaatttgattattcccgccctaataatcactcaaagcaaatatcttgacaatgatctttattcataatagaaggtttccattgagcaaatggagcatattatgtacaatcttctttgtgataattgggtaaatgtgatctatctttcgggcaaaccagatagaatatctttagtgcagactcttaaagatgcacacaatctgcaactggcatacagcaaccccatggacaggtttgctgtcttcagattcctgcttgctcttggctactggtgtttcgctaacaccaacgaggcccctgaacctgataagccgcttccggtctcctggataccctggctggaggaaaacaaggagtatttcgagctctttggggatggcccccggttttaccaagacaatccaagttccaggatcagagccattaccgaccttattcatgagataccaacagctcataatctatgccatttcaatcatgtcaccgactatatcgatgggctctgcgaagcttgctgcatcaagggactgctgagattacctgtctttaccactgtcggtggcagagggataggtgcgggaatcaacaacactcctccattttacctgctctggcatgcaaatgacctcgctggcatgctggctcataattggcaaccctgggataatatggggattccggcatggttgggttcttttcaaaaagaaagcaaggaagtgggcttacttgccggaatgacctggctgccgcgcaaggtgcatctgcatgatcccgtcccaggtcaggcagcatgtagttcctgcggcttaccctccgaagctctcgtctattcctgcagcatagaagtggagccagtaccggaaggccttgagtggaaagaccctcatggtgtttacaccgatctgaaaaaaagcctccagtccaaaatcaaactgatgtccaatgatagatacactttcgcggaccgggattggtatagtccgctgttcagctatttgcgcgcggaaggaaactccagaaaaggaaaactctggttggttggatttgccagtgataaagcaaaaagcatagacatctgggacaagatcatcgagtttgagggaactgatacaaatgatgagttgctggctcaattggcaaacagggctactgcccttaatatcatgcgcaagatatctctcagaggtgatttcaaaaagtcagtgggcacaccccagattgctgacattatcccccacgccgaaagcagaattgccatcaatgcgggtaaaatgactgagaacaggggctattcctggcaggatgccgatgctgaatacagagaactgctcacaaaggttgcgtgctctttggagccggctcaaacagtggacgccaggctcaagagaggtaaattcatttcccgcaagccctggccaattataccagaatccaaaacaaaacccgcagagggggaccaaaatgaatagaggaacagttgacttcattacaagcctggagaacctcaaagaaggcgatttgggcattcttagaaaactcaggggagcccggcttgatgaagagcttcccggatttgacctttttacagccctctggtggcctttgcggcaaaagaatcaacgcgcccccaagcgtgaagtggcttggttgatcgccaaactttttgctgaattccgctttgaacagcgcgaggaagccactttgcccatacttatgggaagcatttgccggaaacttggaccaaaaaaggaattaccccgtgtactggcacgttttgatcaacttgcatcgcttgacattatgcatatggaagaaccgctgttggtcatcatgggtattttgcgaaagcaccagcaggtctactttgactgggtagatctgacagatgttctgtcattttgggagcaggagactgtcaaaagagaatggtcggattcatttactaaagcatacaagatcaacaaggaggattcagatgttgattgaaattcatatgattcagaatcacagcccggcaaatcttaaccgggacgacttgggcgcccccaagacctgttatttcggtggagtattacgttcgcgcatctccagccagtgcatcaagcgcagcatccgttttgccccggagttcgcagaccttagaggaggtatccgaacaaggcgtctggcagagaaacttgaggaaatgctggaaaacaaagataagaagctggttgcaaagttcctggaagcctgtggagttaaaaccaaatcttccaagaaagctggaaaaaagtccgaacagatacccgcggaaaccgatgaagctcaggaagagcagcaggcggctgatacgtcggatatgctgatttttaccacctatgatgccctacgccaaatggccgtcctgctttccaactccaatctcggtgaaagtgaaaaactgcttgggtttaaggaactacttacaaactgcgtccattctcctgatatagcactttgcggcaggatgttggagaccaaagagcttaaaaacactggcgtggaatgcgctttgcaggttgcacatgcgctttccacccacattgccaggccggagatcgactactttgtagcggccgatgatgttcctggtgaagacgccggagcgggtcatattggcgaatccatgtttgcctcagcctgtttctacaaatacttctccattgattgggagcaattggtcaagaacctgaaaggagacactcatctggcagcccacaccgtgggtgcctttctcctcgccgctgccaaaaccaaccccagtggcaaacagaacagcttcgccgctcataacttgccagatggcatacttgtcgagttcaaaaattcccctattagctacgccaacgcattcgtcaggccagtttccctggtcaaggattcggacctggtggagcaaagcatcggccagctttccaactacgtgaacgacatcaggcttggctattatgatgagcaatccccagttatcagcttctggttttctccaaacaatcgctattcccttggcaaagagcatcccaaactggcctccaggagcattggcaacctcaatgagcttgtaagcgccgtgttggattatattggcagcttcgagtgggaagaagttcggaaaagcaaggcttatgttggcgggtgacatgagtgctccacccaataccttattcttgcgcttggagggggctttgcagtcctggggcagcaacgaggctaagtttgctttgcgcaggactgccgacgctccgacaaaatctggtgtcctgggactgctctgcgcggcaatgggaattgggcgcgcggaggctgctgattcatggctcccaaaacttgccaacctgcgcatgggcgtgcggatagaccgccccggcatacgctggtgggatttccacactgtgggcgcgggacaaagaatgcgcatggcagagctgaaggcacccaagaaaccttccatggttggagcggccctggctgagaccttgacaccaaacaaaatacaaaccagggcagagactttgctctcacgccgcgaatatcttgccgacgccagttttctggtcgccttgcaaggtgagccggaacttgtggaaaagctctccaccgctctggccaagccggtctgggctatttatctggggcgcaaatcctgtcccccttcacgtcccgtaggcgagcatcctccgggcttttacaacactttggaggaggcgctgtccgcggttcccctgcaaaagcgctggcacaatgaacccctgccgcaaacactgccttgcgtcatggactggattcccagccgtgacggagaacatgcacctgatgacgcagagattcattacgatctgccggtttcttttcagccgcccagacatttgccgcgcttcgtgatcaggcgtgagctgtttgtgggagaggatgtgcaagtgagcagggaaaccggaaccaacgtttggaggcccaaaggaacccgggcggattatagcaattccgagtataagaaggtcagggcggagcggcttgtgatggatcatgccgcgtgcatggtgtgcaaagctcctgccacgacagttcaacacgtggattaccgcagggcgggaggcaaggaagtaccggaagatctgcgggcgctgtgccgcctctgccacgacgcctgcaccatgctggaatacggttccggcatgaccaccgatcgcatcgacccctgcgaccccatctggcgggagcgtattttgtcaaagcgcaaagaaatagtcgagttccgttcgcgcgggcagcgtttccgcaaaatgaaaccagaggaggaagacggatgatctacttgtccaggctattgatcgatactggaggcaatccagaccgcccccgccccggcagaaagtggctggacaatgtctataacgtccaccgccgcctctccatggcgtttccttcaggtttacgccgggagcaggatccgcatttcctgaagcccttttcgccaaacgacttccaaaaaactcccttccttttccgggtcgataacaacatcgacggaaacgataaaagggcgattattatcgtccagtccgttcttgagccggattgggattattgcttccaaaacgcgcttgatttcctggccgcgccgccggaaacaaaggagtataatccagagtttaaagcgggacaactgctgcggttcaggctgcgggtaaacgccagcgtacgccgtcatattcctgaaatggtgcaacaggacggtcaaaccatagaaactggcaaaatcctgcacaaaagggtttctcttacctgggatgcttcttccaccccggatcaggcccttgccgactggctggctgccaaaagcccaaagctgggcttcacccttcagcgctgtgagcttcttcaactgggttgggtttatggctccaagccagaaccaaaaaatgtcaaagtaaaggaacaggggcagggctactggcgtgaacacacatacaatcctctgcgcttccgtgcggctctcctggagggagttctcgaggtggatgacccgaaactgttcctggaaacgcttagcagcggcattggaaaagcgaaaagtttcggctttggcctgctgtcagttctgccaatcaggaatgatggataaagacctgcactctattccccggatcagagaccggcttagctatctctatgtggagcatgccaaaattgaccagaacgggcaagccatcgccattcacgacgctctgggtgaaaccccggttccttgtgccggcttggctatgctgatgctgggaccgggcataaccatcacacatgcggcaatactttcactggctgcctgtggctgtctcgtagcctgggtgggagaacatggcgtcaggttctatgccgcaggcacaggtacaacccgcagcgctgtcaatcttatgaaacaggcaaagtactgggcagacccggttttgcatctacgggttgtacgcgccatgtaccagttaaggtttcaggatgagctttctccagatttaactttgaaccagatcaggggcaaggaaggtgcccgggtgcgcgatacatatttccaactctcccaaaagtatggtgtgcccatgcagggcagaaactatcaaagagacaactggaataaagcagaccccataaaccgggctttatctgtggcaaactcatgcctctacggcatatcgcacgctgccatcgttgctgcaggattctctcccggattgggctttgtccacactggcaagcaactgtcatttgtctatgatatcgcggatctatacaaaatggagatggctgctcccgccgcattccgggcgaccgctgaagggatcggcgaactcgaccgcagagtcaggcttgcctgccgtgatgaattccacaggcagaatctactcaaacgcattgtcgctgacattagttctctcttcggtgatattatgccagaggatagcccggatgactgttttgccgaagaaccagccttgcctggaggactctggtctccagatggagaagtttccccaggcggcatatcttacgggcaggatgatctgccaaaggaagattgatggtggttttggttttggaaaacgtgccaaactccttgcggggtcagatcacacgttggctgctggaagtaaaggcgggggtgtttgtgggtaaagtctcagcaatggttagggacaaactgtgggataaggttagaagcaattgcagcggtgggacttgcctgatgatctggagtagccaggccgaacagggttttgatatcgaattctggggtgccgcatcaagagtcgttacggaatgggagggtatcaaactaatgaccaaacatccttgaactaaggcttgaaggagctcaatgacctgttagctctctattgatcaagtgtattccccacgcatgtgggggtgaaccgatggcgggtgagatcgcgaatctcaaccagaagtattccccacgcatgtgggggtgaaccgagatctcgctcatccacggctgggtgg

SEQ ID NO: 1020 - DNA, 101734 bp, Artificial Sequence
  Synthetic Oligonucleotide
  misc_feature (1)..(89642): n is a, c, g, or t
nnnnnnnnnnnnnnnnnnnnnnnnnnnnnnnnnnnnnnnnnnnnnnnnnnnnnnnnnnnnnnnnnnnnnnnnnnnnnnnnnnnnnnnnnnnnnnnnnnnnnnnnnnnnnnnnnnnnnnnnnnnnnnnnnnnnnnnnnnnnnnnnnnnnnnnnnnnnnnnnnnnnnnnnnnnnnnnnnnnnnnnnnnnnnnnnnnnnnnnnnnnnnnnnnnnnnnnnnnnnnnnnnnnnnnnnnnnnnnnnnnnnnnnnnnnnnnnnnnnnnnnnnnnnnnnnnnnnnnnnnnnnnnnnnnnnnnnnnnnnnnnnnnnnnnnnnnnnnnnnnnnnnnnnnnnnnnnnnnnnnnnnnnnnnnnnnnnnnnnnnnnnnnnnnnnnnnnnnnnnnnnnnnnnnnnnnnnnnnnnnnnnnnnnnnnnnnnnnnnnnnnnnnnnnnnnnnnnnnnnnnnnnnnnnnnnnnnnnnnnnnnnnnnnnnnnnnnnnnnnnnnnnnnnnnnnnnnnnnnnnnnnnnnnnnnnnnnnnnnnnnnnnnnnnnnnnnnnnnnnnnnnnnnnnnnnnnnnnnnnnnnnnnnnnnnnnnnnnnnnnnnnnnnnnnnnnnnnnnnnnnnnnnnnnnnnnnnnnnnnnnnnnnnnnnnnnnnnnnnnnnnnnnnnnnnnnnnnnnnnnnnnnnnnnnnnnnnnnnnnnnnnnnnnnnnnnnnnnnnnnnnnnnnnnnnnnnnnnnnnnnnnnnnnnnnnnnnnnnnnnnnnnnnnnnnnnnnnnnnnnnnnnnnnnnnnnnnnnnnnnnnnnnnnnnnnnnnnnnnnnnnnnnnnnnnnnnnnnnnnnnnnnnnnnnnnnnnnnnnnnnnnnnnnnnnnnnnnnnnnnnnnnnnnnnnnnnnnnnnnnnnnnnnnnnnnnnnnnnnnnnnnnnnnnnnnnnnnnnnnnnnnnnnnnnnnnnnnnnnnnnnnnnnnnnnnnnnnnnnnnnnnnnnnnnnnnnnnnnnnnnnnnnnnnnnnnnnnnnnnnnnnnnnnnnnnnnnnnnnnnnnnnnnnnnnnnnnnnnnnnnnnnnnnnnnnnnnnnnnnnnnnnnnnnnnnnnnnnnnnnnnnnnnnnnnnnnnnnnnnnnnnnnnnnnnnnnnnnnnnnnnnnnnnnnnnnnnnnnnnnnnnnnnnnnnnnnnnnnnnnnnnnnnnnnnnnnnnnnnnnnnnnnnnnnnnnnnnnnnnnnnnnnnnnnnnnnnnnnnnnnnnnnnnnnnnnnnnnnnnnnnnnnnnnnnnnnnnnnnnnnnnnnnnnnnnnnnnnnnnnnnnnnnnnnnnnnnnnnnnnnnnnnnnnnnnnnnnnnnnnnnnnnnnnnnnnnnnnnnnnnnnnnnnnnnnnnnnnnnnnnnnnnnnnnnnnnnnnnnnnnnnnnnnnnnnnnnnnnnnnnnnnnnnnnnnnnnnnnnnnnnnnnnnnnnnnnnnnnnnnnnnnnnnnnnnnnnnnnnnnnnnnnnnnnnnnnnnnnnnnnnnnnnnnnnnnnnnnnnnnnnnnnnnnnnnnnnnnnnnnnnnnnnnnnnnnnnnnnnnnnnnnnnnnnnnnnnnnnnnnnnnnnnnnnnnnnnnnnnnnnnnnnnnnnnnnnnnnnnnnnnnnnnnnnnnnnnnnnnnnnnnnnnnnnnnnnnnnnnnnnnnnnnnnnnnnnnnnnnnnnnnnnnnnnnnnnnnnnnnnnnnnnnnnnnnnnnnnnnnnnnnnnnnnnnnnnnnnnnnnnnnnnnnnnnnnnnnnnnnnnnnnnnnnnnnnnnnnnnnnnnnnnnnnnnnnnnnnnnnnnnnnnnnnnnnnnnnnnnnnnnnnnnnnnnnnnnnnnnnnnnnnnnnnnnnnnnnnnnnnnnnnnnnnnnnnnnnnnnnnnnnnnnnnnnnnnnnnnnnnnnnnnnnnnnnnnnnnnnnnnnnnnnnnnnnnnnnnnnnnnnnnnnnnnnnnnnnnnnnnnnnnnnnnnnnnnnnnnnnnnnnnnnnnnnnnnnnnnnnnnnnnnnnnnnnnnnnnnnnnnnnnnnnnnnnnnnnnnnnnnnnnnnnnnnnnnnnnnnnnnnnnnnnnnnnnnnnnnnnnnnnnnnnnnnnnnnnnnnnnnnnnnnnnnnnnnnnnnnnnnnnnnnnnnnnnnnnnnnnnnnnnnnnnnnnnnnnnnnnnnnnnnnnnnnnnnnnnnnnnnnnnnnnnnnnnnnnnnnnnnnnnnnnnnnnnnnnnnnnnnnnnnnnnnnnnnnnnnnnnnnnnnnnnnnnnnnnnnnnnnnnnnnnnnnnnnnnnnnnnnnnnnnnnnnnnnnnnnnnnnnnnnnnnnnnnnnnnnnnnnnnnnnnnnnnnnnnnnnnnnnnnnnnnnnnnnnnnnnnnnnnnnnnnnnnnnnnnnnnnnnnnnnnnnnnnnnnnnnnnnnnnnnnnnnnnnnnnnnnnnnnnnnnnnnnnnnnnnnnnnnnnnnnnnnnnnnnnnnnnnnnnnnnnnnnnnnnnnnnnnnnnnnnnnnnnnnnnnnnnnnnnnnnnnnnnnnnnnnnnnnnnnnnnnnnnnnnnnnnnnnnnnnnnnnnnnnnnnnnnnnnnnnnnnnnnnnnnnnnnnnnnnnnnnnnnnnnnnnnnnnnnnnnnnnnnnnnnnnnnnnnnnnnnnnnnnnnnnnnnnnnnnnnnnnnnnnnnnnnnnnnnnnnnnnnnnnnnnnnnnnnnnnnnnnnnnnnnnnnnnnnnnnnnnnnnnnnnnnnnnnnnnnnnnnnnnnnnnnnnnnnnnnnnnnnnnnnnnnnnnnnnnnnnnnnnnnnnnnnnnnnnnnnnnnnnnnnnnnnnnnnnnnnnnnnnnnnnnnnnnnnnnnnnnnnnnnnnnnnnnnnnnnnnnnnnnnnnnnnnnnnnnnnnnnnnnnnnnnnnnnnnnnnnnnnnnnnnnnnnnnnnnnnnnnnnnnnnnnnnnnnnnnnnnnnnnnnnnnnnnnnnnnnnnnnnnnnnnnnnnnnnnnnnnnnnnnnnnnnnnnnnnnnnnnnnnnnnnnnnnnnnnnnnnnnnnnnnnnnnnnnnnnnnnnnnnnnnnnnnnnnnnnnnnnnnnnnnnnnnnnnnnnnnnnnnnnnnnnnnnnnnnnnnnnnnnnnnnnnnnnnnnnnnnnnnnnnnnnnnnnnnnnnnnnnnnnnnnnnnnnnnnnnnnnnnnnnnnnnnnnnnnnnnnnnnnnnnnnnnnnnnnnnnnnnnnnnnnnnnnnnnnnnnnnnnnnnnnnnnnnnnnnnnnnnnnnnnnnnnnnnnnnnnnnnnnnnnnnnnnnnnnnnnnnnnnnnnnnnnnnnnnnnnnnnnnnnnnnnnnnnnnnnnnnnnnnnnnnnnnnnnnnnnnnnnnnnnnnnnnnnnnnnnnnnnnnnnnnnnnnnnnnnnnnnnnnnnnnnnnnnnnnnnnnnnnnnnnnnnnnnnnnnnnnnnnnnnnnnnnnnnnnnnnnnnnnnnnnnnnnnnnnnnnnnnnnnnnnnnnnnnnnnnnnnnnnnnnnnnnnnnnnnnnnnnnnnnnnnnnnnnnnnnnnnnnnnnnnnnnnnnnnnnnnnnnnnnnnnnnnnnnnnnnnnnnnnnnnnnnnnnnnnnnnnnnnnnnnnnnnnnnnnnnnnnnnnnnnnnnnnnnnnnnnnnnnnnnnnnnnnnnnnnnnnnnnnnnnnnnnnnnnnnnnnnnnnnnnnnnnnnnnnnnnnnnnnnnnnnnnnnnnnnnnnnnnnnnnnnnnnnnnnnnnnnnnnnnnnnnnnnnnnnnnnnnnnnnnnnnnnnnnnnnnnnnnnnnnnnnnnnnnnnnnnnnnnnnnnnnnnnnnnnnnnnnnnnnnnnnnnnnnnnnnnnnnnnnnnnnnnnnnnnnnnnnnnnnnnnnnnnnnnnnnnnnnnnnnnnnnnnnnnnnnnnnnnnnnnnnnnnnnnnnnnnnnnnnnnnnnnnnnnnnnnnnnnnnnnnnnnnnnnnnnnnnnnnnnnnnnnnnnnnnnnnnnnnnnnnnnnnnnnnnnnnnnnnnnnnnnnnnnnnnnnnnnnnnnnnnnnnnnnnnnnnnnnnnnnnnnnnnnnnnnnnnnnnnnnnnnnnnnnnnnnnnnnnnnnnnnnnnnnnnnnnnnnnnnnnnnnnnnnnnnnnnnnnnnnnnnnnnnnnnnnnnnnnnnnnnnnnnnnnnnnnnnnnnnnnnnnnnnnnnnnnnnnnnnnnnnnnnnnnnnnnnnnnnnnnnnnnnnnnnnnnnnnnnnnnnnnnnnnnnnnnnnnnnnnnnnnnnnnnnnnnnnnnnnnnnnnnnnnnnnnnnnnnnnnnnnnnnnnnnnnnnnnnnnnnnnnnnnnnnnnnnnnnnnnnnnnnnnnnnnnnnnnnnnnnnnnnnnnnnnnnnnnnnnnnnnnnnnnnnnnnnnnnnnnnnnnnnnnnnnnnnnnnnnnnnnnnnnnnnnnnnnnnnnnnnnnnnnnnnnnnnnnnnnnnnnnnnnnnnnnnnnnnnnnnnnnnnnnnnnnnnnnnnnnnnnnnnnnnnnnnnnnnnnnnnnnnnnnnnnnnnnnnnnnnnnnnnnnnnnnnnnnnnnnnnnnnnnnnnnnnnnnnnnnnnnnnnnnnnnnnnnnnnnnnnnnnnnnnnnnnnnnnnnnnnnnnnnnnnnnnnnnnnnnnnnnnnnnnnnnnnnnnnnnnnnnnnnnnnnnnnnnnnnnnnnnnnnnnnnnnnnnnnnnnnnnnnnnnnnnnnnnnnnnnnnnnnnnnnnnnnnnnnnnnnnnnnnnnnnnnnnnnnnnnnnnnnnnnnnnnnnnnnnnnnnnnnnnnnnnnnnnnnnnnnnnnnnnnnnnnnnnnnnnnnnnnnnnnnnnnnnnnnnnnnnnnnnnnnnnnnnnnnnnnnnnnnnnnnnnnnnnnnnnnnnnnnnnnnnnnnnnnnnnnnnnnnnnnnnnnnnnnnnnnnnnnnnnnnnnnnnnnnnnnnnnnnnnnnnnnnnnnnnnnnnnnnnnnnnnnnnnnnnnnnnnnnnnnnnnnnnnnnnnnnnnnnnnnnnnnnnnnnnnnnnnnnnnnnnnnnnnnnnnnnnnnnnnnnnnnnnnnnnnnnnnnnnnnnnnnnnnnnnnnnnnnnnnnnnnnnnnnnnnnnnnnnnnnnnnnnnnnnnnnnnnnnnnnnnnnnnnnnnnnnnnnnnnnnnnnnnnnnnnnnnnnnnnnnnnnnnnnnnnnnnnnnnnnnnnnnnnnnnnnnnnnnnnnnnnnnnnnnnnnnnnnnnnnnnnnnnnnnnnnnnnnnnnnnnnnnnnnnnnnnnnnnnnnnnnnnnnnnnnnnnnnnnnnnnnnnnnnnnnnnnnnnnnnnnnnnnnnnnnnnnnnnnnnnnnnnnnnnnnnnnnnnnnnnnnnnnnnnnnnnnnnnnnnnnnnnnnnnnnnnnnnnnnnnnnnnnnnnnnnnnnnnnnnnnnnnnnnnnnnnnnnnnnnnnnnnnnnnnnnnnnnnnnnnnnnnnnnnnnnnnnnnnnnnnnnnnnnnnnnnnnnnnnnnnnnnnnnnnnnnnnnnnnnnnnnnnnnnnnnnnnnnnnnnnnnnnnnnnnnnnnnnnnnnnnnnnnnnnnnnnnnnnnnnnnnnnnnnnnnnnnnnnnnnnnnnnnnnnnnnnnnnnnnnnnnnnnnnnnnnnnnnnnnnnnnnnnnnnnnnnnnnnnnnnnnnnnnnnnnnnnnnnnnnnnnnnnnnnnnnnnnnnnnnnnnnnnnnnnnnnnnnnnnnnnnnnnnnnnnnnnnnnnnnnnnnnnnnnnnnnnnnnnnnnnnnnnnnnnnnnnnnnnnnnnnnnnnnnnnnnnnnnnnnnnnnnnnnnnnnnnnnnnnnnnnnnnnnnnnnnnnnnnnnnnnnnnnnnnnnnnnnnnnnnnnnnnnnnnnnnnnnnnnnnnnnnnnnnnnnnnnnnnnnnnnnnnnnnnnnnnnnnnnnnnnnnnnnnnnnnnnnnnnnnnnnnnnnnnnnnnnnnnnnnnnnnnnnnnnnnnnnnnnnnnnnnnnnnnnnnnnnnnnnnnnnnnnnnnnnnnnnnnnnnnnnnnnnnnnnnnnnnnnnnnnnnnnnnnnnnnnnnnnnnnnnnnnnnnnnnnnnnnnnnnnnnnnnnnnnnnnnnnnnnnnnnnnnnnnnnnnnnnnnnnnnnnnnnnnnnnnnnnnnnnnnnnnnnnnnnnnnnnnnnnnnnnnnnnnnnnnnnnnnnnnnnnnnnnnnnnnnnnnnnnnnnnnnnnnnnnnnnnnnnnnnnnnnnnnnnnnnnnnnnnnnnnnnnnnnnnnnnnnnnnnnnnnnnnnnnnnnnnnnnnnnnnnnnnnnnnnnnnnnnnnnnnnnnnnnnnnnnnnnnnnnnnnnnnnnnnnnnnnnnnnnnnnnnnnnnnnnnnnnnnnnnnnnnnnnnnnnnnnnnnnnnnnnnnnnnnnnnnnnnnnnnnnnnnnnnnnnnnnnnnnnnnnnnnnnnnnnnnnnnnnnnnnnnnnnnnnnnnnnnnnnnnnnnnnnnnnnnnnnnnnnnnnnnnnnnnnnnnnnnnnnnnnnnnnnnnnnnnnnnnnnnnnnnnnnnnnnnnnnnnnnnnnnnnnnnnnnnnnnnnnnnnnnnnnnnnnnnnnnnnnnnnnnnnnnnnnnnnnnnnnnnnnnnnnnnnnnnnnnnnnnnnnnnnnnnnnnnnnnnnnnnnnnnnnnnnnnnnnnnnnnnnnnnnnnnnnnnnnnnnnnnnnnnnnnnnnnnnnnnnnnnnnnnnnnnnnnnnnnnnnnnnnnnnnnnnnnnnnnnnnnnnnnnnnnnnnnnnnnnnnnnnnnnnnnnnnnnnnnnnnnnnnnnnnnnnnnnnnnnnnnnnnnnnnnnnnnnnnnnnnnnnnnnnnnnnnnnnnnnnnnnnnnnnnnnnnnnnnnnnnnnnnnnnnnnnnnnnnnnnnnnnnnnnnnnnnnnnnnnnnnnnnnnnnnnnnnnnnnnnnnnnnnnnnnnnnnnnnnnnnnnnnnnnnnnnnnnnnnnnnnnnnnnnnnnnnnnnnnnnnnnnnnnnnnnnnnnnnnnnnnnnnnnnnnnnnnnnnnnnnnnnnnnnnnnnnnnnnnnnnnnnnnnnnnnnnnnnnnnnnnnnnnnnnnnnnnnnnnnnnnnnnnnnnnnnnnnnnnnnnnnnnnnnnnnnnnnnnnnnnnnnnnnnnnnnnnnnnnnnnnnnnnnnnnnnnnnnnnnnnnnnnnnnnnnnnnnnnnnnnnnnnnnnnnnnnnnnnnnnnnnnnnnnnnnnnnnnnnnnnnnnnnnnnnnnnnnnnnnnnnnnnnnnnnnnnnnnnnnnnnnnnnnnnnnnnnnnnnnnnnnnnnnnnnnnnnnnnnnnnnnnnnnnnnnnnnnnnnnnnnnnnnnnnnnnnnnnnnnnnnnnnnnnnnnnnnnnnnnnnnnnnnnnnnnnnnnnnnnnnnnnnnnnnnnnnnnnnnnnnnnnnnnnnnnnnnnnnnnnnnnnnnnnnnnnnnnnnnnnnnnnnnnnnnnnnnnnnnnnnnnnnnnnnnnnnnnnnnnnnnnnnnnnnnnnnnnnnnnnnnnnnnnnnnnnnnnnnnnnnnnnnnnnnnnnnnnnnnnnnnnnnnnnnnnnnnnnnnnnnnnnnnnnnnnnnnnnnnnnnnnnnnnnnnnnnnnnnnnnnnnnnnnnnnnnnnnnnnnnnnnnnnnnnnnnnnnnnnnnnnnnnnnnnnnnnnnnnnnnnnnnnnnnnnnnnnnnnnnnnnnnnnnnnnnnnnnnnnnnnnnnnnnnnnnnnnnnnnnnnnnnnnnnnnnnnnnnnnnnnnnnnnnnnnnnnnnnnnnnnnnnnnnnnnnnnnnnnnnnnnnnnnnnnnnnnnnnnnnnnnnnnnnnnnnnnnnnnnnnnnnnnnnnnnnnnnnnnnnnnnnnnnnnnnnnnnnnnnnnnnnnnnnnnnnnnnnnnnnnnnnnnnnnnnnnnnnnnnnnnnnnnnnnnnnnnnnnnnnnnnnnnnnnnnnnnnnnnnnnnnnnnnnnnnnnnnnnnnnnnnnnnnnnnnnnnnnnnnnnnnnnnnnnnnnnnnnnnnnnnnnnnnnnnnnnnnnnnnnnnnnnnnnnnnnnnnnnnnnnnnnnnnnnnnnnnnnnnnnnnnnnnnnnnnnnnnnnnnnnnnnnnnnnnnnnnnnnnnnnnnnnnnnnnnnnnnnnnnnnnnnnnnnnnnnnnnnnnnnnnnnnnnnnnnnnnnnnnnnnnnnnnnnnnnnnnnnnnnnnnnnnnnnnnnnnnnnnnnnnnnnnnnnnnnnnnnnnnnnnnnnnnnnnnnnnnnnnnnnnnnnnnnnnnnnnnnnnnnnnnnnnnnnnnnnnnnnnnnnnnnnnnnnnnnnnnnnnnnnnnnnnnnnnnnnnnnnnnnnnnnnnnnnnnnnnnnnnnnnnnnnnnnnnnnnnnnnnnnnnnnnnnnnnnnnnnnnnnnnnnnnnnnnnnnnnnnnnnnnnnnnnnnnnnnnnnnnnnnnnnnnnnnnnnnnnnnnnnnnnnnnnnnnnnnnnnnnnnnnnnnnnnnnnnnnnnnnnnnnnnnnnnnnnnnnnnnnnnnnnnnnnnnnnnnnnnnnnnnnnnnnnnnnnnnnnnnnnnnnnnnnnnnnnnnnnnnnnnnnnnnnnnnnnnnnnnnnnnnnnnnnnnnnnnnnnnnnnnnnnnnnnnnnnnnnnnnnnnnnnnnnnnnnnnnnnnnnnnnnnnnnnnnnnnnnnnnnnnnnnnnnnnnnnnnnnnnnnnnnnnnnnnnnnnnnnnnnnnnnnnnnnnnnnnnnnnnnnnnnnnnnnnnnnnnnnnnnnnnnnnnnnnnnnnnnnnnnnnnnnnnnnnnnnnnnnnnnnnnnnnnnnnnnnnnnnnnnnnnnnnnnnnnnnnnnnnnnnnnnnnnnnnnnnnnnnnnnnnnnnnnnnnnnnnnnnnnnnnnnnnnnnnnnnnnnnnnnnnnnnnnnnnnnnnnnnnnnnnnnnnnnnnnnnnnnnnnnnnnnnnnnnnnnnnnnnnnnnnnnnnnnnnnnnnnnnnnnnnnnnnnnnnnnnnnnnnnnnnnnnnnnnnnnnnnnnnnnnnnnnnnnnnnnnnnnnnnnnnnnnnnnnnnnnnnnnnnnnnnnnnnnnnnnnnnnnnnnnnnnnnnnnnnnnnnnnnnnnnnnnnnnnnnnnnnnnnnnnnnnnnnnnnnnnnnnnnnnnnnnnnnnnnnnnnnnnnnnnnnnnnnnnnnnnnnnnnnnnnnnnnnnnnnnnnnnnnnnnnnnnnnnnnnnnnnnnnnnnnnnnnnnnnnnnnnnnnnnnnnnnnnnnnnnnnnnnnnnnnnnnnnnnnnnnnnnnnnnnnnnnnnnnnnnnnnnnnnnnnnnnnnnnnnnnnnnnnnnnnnnnnnnnnnnnnnnnnnnnnnnnnnnnnnnnnnnnnnnnnnnnnnnnnnnnnnnnnnnnnnnnnnnnnnnnnnnnnnnnnnnnnnnnnnnnnnnnnnnnnnnnnnnnnnnnnnnnnnnnnnnnnnnnnnnnnnnnnnnnnnnnnnnnnnnnnnnnnnnnnnnnnnnnnnnnnnnnnnnnnnnnnnnnnnnnnnnnnnnnnnnnnnnnnnnnnnnnnnnnnnnnnnnnnnnnnnnnnnnnnnnnnnnnnnnnnnnnnnnnnnnnnnnnnnnnnnnnnnnnnnnnnnnnnnnnnnnnnnnnnnnnnnnnnnnnnnnnnnnnnnnnnnnnnnnnnnnnnnnnnnnnnnnnnnnnnnnnnnnnnnnnnnnnnnnnnnnnnnnnnnnnnnnnnnnnnnnnnnnnnnnnnnnnnnnnnnnnnnnnnnnnnnnnnnnnnnnnnnnnnnnnnnnnnnnnnnnnnnnnnnnnnnnnnnnnnnnnnnnnnnnnnnnnnnnnnnnnnnnnnnnnnnnnnnnnnnnnnnnnnnnnnnnnnnnnnnnnnnnnnnnnnnnnnnnnnnnnnnnnnnnnnnnnnnnnnnnnnnnnnnnnnnnnnnnnnnnnnnnnnnnnnnnnnnnnnnnnnnnnnnnnnnnnnnnnnnnnnnnnnnnnnnnnnnnnnnnnnnnnnnnnnnnnnnnnnnnnnnnnnnnnnnnnnnnnnnnnnnnnnnnnnnnnnnnnnnnnnnnnnnnnnnnnnnnnnnnnnnnnnnnnnnnnnnnnnnnnnnnnnnnnnnnnnnnnnnnnnnnnnnnnnnnnnnnnnnnnnnnnnnnnnnnnnnnnnnnnnnnnnnnnnnnnnnnnnnnnnnnnnnnnnnnnnnnnnnnnnnnnnnnnnnnnnnnnnnnnnnnnnnnnnnnnnnnnnnnnnnnnnnnnnnnnnnnnnnnnnnnnnnnnnnnnnnnnnnnnnnnnnnnnnnnnnnnnnnnnnnnnnnnnnnnnnnnnnnnnnnnnnnnnnnnnnnnnnnnnnnnnnnnnnnnnnnnnnnnnnnnnnnnnnnnnnnnnnnnnnnnnnnnnnnnnnnnnnnnnnnnnnnnnnnnnnnnnnnnnnnnnnnnnnnnnnnnnnnnnnnnnnnnnnnnnnnnnnnnnnnnnnnnnnnnnnnnnnnnnnnnnnnnnnnnnnnnnnnnnnnnnnnnnnnnnnnnnnnnnnnnnnnnnnnnnnnnnnnnnnnnnnnnnnnnnnnnnnnnnnnnnnnnnnnnnnnnnnnnnnnnnnnnnnnnnnnnnnnnnnnnnnnnnnnnnnnnnnnnnnnnnnnnnnnnnnnnnnnnnnnnnnnnnnnnnnnnnnnnnnnnnnnnnnnnnnnnnnnnnnnnnnnnnnnnnnnnnnnnnnnnnnnnnnnnnnnnnnnnnnnnnnnnnnnnnnnnnnnnnnnnnnnnnnnnnnnnnnnnnnnnnnnnnnnnnnnnnnnnnnnnnnnnnnnnnnnnnnnnnnnnnnnnnnnnnnnnnnnnnnnnnnnnnnnnnnnnnnnnnnnnnnnnnnnnnnnnnnnnnnnnnnnnnnnnnnnnnnnnnnnnnnnnnnnnnnnnnnnnnnnnnnnnnnnnnnnnnnnnnnnnnnnnnnnnnnnnnnnnnnnnnnnnnnnnnnnnnnnnnnnnnnnnnnnnnnnnnnnnnnnnnnnnnnnnnnnnnnnnnnnnnnnnnnnnnnnnnnnnnnnnnnnnnnnnnnnnnnnnnnnnnnnnnnnnnnnnnnnnnnnnnnnnnnnnnnnnnnnnnnnnnnnnnnnnnnnnnnnnnnnnnnnnnnnnnnnnnnnnnnnnnnnnnnnnnnnnnnnnnnnnnnnnnnnnnnnnnnnnnnnnnnnnnnnnnnnnnnnnnnnnnnnnnnnnnnnnnnnnnnnnnnnnnnnnnnnnnnnnnnnnnnnnnnnnnnnnnnnnnnnnnnnnnnnnnnnnnnnnnnnnnnnnnnnnnnnnnnnnnnnnnnnnnnnnnnnnnnnnnnnnnnnnnnnnnnnnnnnnnnnnnnnnnnnnnnnnnnnnnnnnnnnnnnnnnnnnnnnnnnnnnnnnnnnnnnnnnnnnnnnnnnnnnnnnnnnnnnnnnnnnnnnnnnnnnnnnnnnnnnnnnnnnnnnnnnnnnnnnnnnnnnnnnnnnnnnnnnnnnnnnnnnnnnnnnnnnnnnnnnnnnnnnnnnnnnnnnnnnnnnnnnnnnnnnnnnnnnnnnnnnnnnnnnnnnnnnnnnnnnnnnnnnnnnnnnnnnnnnnnnnnnnnnnnnnnnnnnnnnnnnnnnnnnnnnnnnnnnnnnnnnnnnnnnnnnnnnnnnnnnnnnnnnnnnnnnnnnnnnnnnnnnnnnnnnnnnnnnnnnnnnnnnnnnnnnnnnnnnnnnnnnnnnnnnnnnnnnnnnnnnnnnnnnnnnnnnnnnnnnnnnnnnnnnnnnnnnnnnnnnnnnnnnnnnnnnnnnnnnnnnnnnnnnnnnnnnnnnnnnnnnnnnnnnnnnnnnnnnnnnnnnnnnnnnnnnnnnnnnnnnnnnnnnnnnnnnnnnnnnnnnnnnnnnnnnnnnnnnnnnnnnnnnnnnnnnnnnnnnnnnnnnnnnnnnnnnnnnnnnnnnnnnnnnnnnnnnnnnnnnnnnnnnnnnnnnnnnnnnnnnnnnnnnnnnnnnnnnnnnnnnnnnnnnnnnnnnnnnnnnnnnnnnnnnnnnnnnnnnnnnnnnnnnnnnnnnnnnnnnnnnnnnnnnnnnnnnnnnnnnnnnnnnnnnnnnnnnnnnnnnnnnnnnnnnnnnnnnnnnnnnnnnnnnnnnnnnnnnnnnnnnnnnnnnnnnnnnnnnnnnnnnnnnnnnnnnnnnnnnnnnnnnnnnnnnnnnnnnnnnnnnnnnnnnnnnnnnnnnnnnnnnnnnnnnnnnnnnnnnnnnnnnnnnnnnnnnnnnnnnnnnnnnnnnnnnnnnnnnnnnnnnnnnnnnnnnnnnnnnnnnnnnnnnnnnnnnnnnnnnnnnnnnnnnnnnnnnnnnnnnnnnnnnnnnnnnnnnnnnnnnnnnnnnnnnnnnnnnnnnnnnnnnnnnnnnnnnnnnnnnnnnnnnnnnnnnnnnnnnnnnnnnnnnnnnnnnnnnnnnnnnnnnnnnnnnnnnnnnnnnnnnnnnnnnnnnnnnnnnnnnnnnnnnnnnnnnnnnnnnnnnnnnnnnnnnnnnnnnnnnnnnnnnnnnnnnnnnnnnnnnnnnnnnnnnnnnnnnnnnnnnnnnnnnnnnnnnnnnnnnnnnnnnnnnnnnnnnnnnnnnnnnnnnnnnnnnnnnnnnnnnnnnnnnnnnnnnnnnnnnnnnnnnnnnnnnnnnnnnnnnnnnnnnnnnnnnnnnnnnnnnnnnnnnnnnnnnnnnnnnnnnnnnnnnnnnnnnnnnnnnnnnnnnnnnnnnnnnnnnnnnnnnnnnnnnnnnnnnnnnnnnnnnnnnnnnnnnnnnnnnnnnnnnnnnnnnnnnnnnnnnnnnnnnnnnnnnnnnnnnnnnnnnnnnnnnnnnnnnnnnnnnnnnnnnnnnnnnnnnnnnnnnnnnnnnnnnnnnnnnnnnnnnnnnnnnnnnnnnnnnnnnnnnnnnnnnnnnnnnnnnnnnnnnnnnnnnnnnnnnnnnnnnnnnnnnnnnnnnnnnnnnnnnnnnnnnnnnnnnnnnnnnnnnnnnnnnnnnnnnnnnnnnnnnnnnnnnnnnnnnnnnnnnnnnnnnnnnnnnnnnnnnnnnnnnnnnnnnnnnnnnnnnnnnnnnnnnnnnnnnnnnnnnnnnnnnnnnnnnnnnnnnnnnnnnnnnnnnnnnnnnnnnnnnnnnnnnnnnnnnnnnnnnnnnnnnnnnnnnnnnnnnnnnnnnnnnnnnnnnnnnnnnnnnnnnnnnnnnnnnnnnnnnnnnnnnnnnnnnnnnnnnnnnnnnnnnnnnnnnnnnnnnnnnnnnnnnnnnnnnnnnnnnnnnnnnnnnnnnnnnnnnnnnnnnnnnnnnnnnnnnnnnnnnnnnnnnnnnnnnnnnnnnnnnnnnnnnnnnnnnnnnnnnnnnnnnnnnnnnnnnnnnnnnnnnnnnnnnnnnnnnnnnnnnnnnnnnnnnnnnnnnnnnnnnnnnnnnnnnnnnnnnnnnnnnnnnnnnnnnnnnnnnnnnnnnnnnnnnnnnnnnnnnnnnnnnnnnnnnnnnnnnnnnnnnnnnnnnnnnnnnnnnnnnnnnnnnnnnnnnnnnnnnnnnnnnnnnnnnnnnnnnnnnnnnnnnnnnnnnnnnnnnnnnnnnnnnnnnnnnnnnnnnnnnnnnnnnnnnnnnnnnnnnnnnnnnnnnnnnnnnnnnnnnnnnnnnnnnnnnnnnnnnnnnnnnnnnnnnnnnnnnnnnnnnnnnnnnnnnnnnnnnnnnnnnnnnnnnnnnnnnnnnnnnnnnnnnnnnnnnnnnnnnnnnnnnnnnnnnnnnnnnnnnnnnnnnnnnnnnnnnnnnnnnnnnnnnnnnnnnnnnnnnnnnnnnnnnnnnnnnnnnnnnnnnnnnnnnnnnnnnnnnnnnnnnnnnnnnnnnnnnnnnnnnnnnnnnnnnnnnnnnnnnnnnnnnnnnnnnnnnnnnnnnnnnnnnnnnnnnnnnnnnnnnnnnnnnnnnnnnnnnnnnnnnnnnnnnnnnnnnnnnnnnnnnnnnnnnnnnnnnnnnnnnnnnnnnnnnnnnnnnnnnnnnnnnnnnnnnnnnnnnnnnnnnnnnnnnnnnnnnnnnnnnnnnnnnnnnnnnnnnnnnnnnnnnnnnnnnnnnnnnnnnnnnnnnnnnnnnnnnnnnnnnnnnnnnnnnnnnnnnnnnnnnnnnnnnnnnnnnnnnnnnnnnnnnnnnnnnnnnnnnnnnnnnnnnnnnnnnnnnnnnnnnnnnnnnnnnnnnnnnnnnnnnnnnnnnnnnnnnnnnnnnnnnnnnnnnnnnnnnnnnnnnnnnnnnnnnnnnnnnnnnnnnnnnnnnnnnnnnnnnnnnnnnnnnnnnnnnnnnnnnnnnnnnnnnnnnnnnnnnnnnnnnnnnnnnnnnnnnnnnnnnnnnnnnnnnnnnnnnnnnnnnnnnnnnnnnnnnnnnnnnnnnnnnnnnnnnnnnnnnnnnnnnnnnnnnnnnnnnnnnnnnnnnnnnnnnnnnnnnnnnnnnnnnnnnnnnnnnnnnnnnnnnnnnnnnnnnnnnnnnnnnnnnnnnnnnnnnnnnnnnnnnnnnnnnnnnnnnnnnnnnnnnnnnnnnnnnnnnnnnnnnnnnnnnnnnnnnnnnnnnnnnnnnnnnnnnnnnnnnnnnnnnnnnnnnnnnnnnnnnnnnnnnnnnnnnnnnnnnnnnnnnnnnnnnnnnnnnnnnnnnnnnnnnnnnnnnnnnnnnnnnnnnnnnnnnnnnnnnnnnnnnnnnnnnnnnnnnnnnnnnnnnnnnnnnnnnnnnnnnnnnnnnnnnnnnnnnnnnnnnnnnnnnnnnnnnnnnnnnnnnnnnnnnnnnnnnnnnnnnnnnnnnnnnnnnnnnnnnnnnnnnnnnnnnnnnnnnnnnnnnnnnnnnnnnnnnnnnnnnnnnnnnnnnnnnnnnnnnnnnnnnnnnnnnnnnnnnnnnnnnnnnnnnnnnnnnnnnnnnnnnnnnnnnnnnnnnnnnnnnnnnnnnnnnnnnnnnnnnnnnnnnnnnnnnnnnnnnnnnnnnnnnnnnnnnnnnnnnnnnnnnnnnnnnnnnnnnnnnnnnnnnnnnnnnnnnnnnnnnnnnnnnnnnnnnnnnnnnnnnnnnnnnnnnnnnnnnnnnnnnnnnnnnnnnnnnnnnnnnnnnnnnnnnnnnnnnnnnnnnnnnnnnnnnnnnnnnnnnnnnnnnnnnnnnnnnnnnnnnnnnnnnnnnnnnnnnnnnnnnnnnnnnnnnnnnnnnnnnnnnnnnnnnnnnnnnnnnnnnnnnnnnnnnnnnnnnnnnnnnnnnnnnnnnnnnnnnnnnnnnnnnnnnnnnnnnnnnnnnnnnnnnnnnnnnnnnnnnnnnnnnnnnnnnnnnnnnnnnnnnnnnnnnnnnnnnnnnnnnnnnnnnnnnnnnnnnnnnnnnnnnnnnnnnnnnnnnnnnnnnnnnnnnnnnnnnnnnnnnnnnnnnnnnnnnnnnnnnnnnnnnnnnnnnnnnnnnnnnnnnnnnnnnnnnnnnnnnnnnnnnnnnnnnnnnnnnnnnnnnnnnnnnnnnnnnnnnnnnnnnnnnnnnnnnnnnnnnnnnnnnnnnnnnnnnnnnnnnnnnnnnnnnnnnnnnnnnnnnnnnnnnnnnnnnnnnnnnnnnnnnnnnnnnnnnnnnnnnnnnnnnnnnnnnnnnnnnnnnnnnnnnnnnnnnnnnnnnnnnnnnnnnnnnnnnnnnnnnnnnnnnnnnnnnnnnnnnnnnnnnnnnnnnnnnnnnnnnnnnnnnnnnnnnnnnnnnnnnnnnnnnnnnnnnnnnnnnnnnnnnnnnnnnnnnnnnnnnnnnnnnnnnnnnnnnnnnnnnnnnnnnnnnnnnnnnnnnnnnnnnnnnnnnnnnnnnnnnnnnnnnnnnnnnnnnnnnnnnnnnnnnnnnnnnnnnnnnnnnnnnnnnnnnnnnnnnnnnnnnnnnnnnnnnnnnnnnnnnnnnnnnnnnnnnnnnnnnnnnnnnnnnnnnnnnnnnnnnnnnnnnnnnnnnnnnnnnnnnnnnnnnnnnnnnnnnnnnnnnnnnnnnnnnnnnnnnnnnnnnnnnnnnnnnnnnnnnnnnnnnnnnnnnnnnnnnnnnnnnnnnnnnnnnnnnnnnnnnnnnnnnnnnnnnnnnnnnnnnnnnnnnnnnnnnnnnnnnnnnnnnnnnnnnnnnnnnnnnnnnnnnnnnnnnnnnnnnnnnnnnnnnnnnnnnnnnnnnnnnnnnnnnnnnnnnnnnnnnnnnnnnnnnnnnnnnnnnnnnnnnnnnnnnnnnnnnnnnnnnnnnnnnnnnnnnnnnnnnnnnnnnnnnnnnnnnnnnnnnnnnnnnnnnnnnnnnnnnnnnnnnnnnnnnnnnnnnnnnnnnnnnnnnnnnnnnnnnnnnnnnnnnnnnnnnnnnnnnnnnnnnnnnnnnnnnnnnnnnnnnnnnnnnnnnnnnnnnnnnnnnnnnnnnnnnnnnnnnnnnnnnnnnnnnnnnnnnnnnnnnnnnnnnnnnnnnnnnnnnnnnnnnnnnnnnnnnnnnnnnnnnnnnnnnnnnnnnnnnnnnnnnnnnnnnnnnnnnnnnnnnnnnnnnnnnnnnnnnnnnnnnnnnnnnnnnnnnnnnnnnnnnnnnnnnnnnnnnnnnnnnnnnnnnnnnnnnnnnnnnnnnnnnnnnnnnnnnnnnnnnnnnnnnnnnnnnnnnnnnnnnnnnnnnnnnnnnnnnnnnnnnnnnnnnnnnnnnnnnnnnnnnnnnnnnnnnnnnnnnnnnnnnnnnnnnnnnnnnnnnnnnnnnnnnnnnnnnnnnnnnnnnnnnnnnnnnnnnnnnnnnnnnnnnnnnnnnnnnnnnnnnnnnnnnnnnnnnnnnnnnnnnnnnnnnnnnnnnnnnnnnnnnnnnnnnnnnnnnnnnnnnnnnnnnnnnnnnnnnnnnnnnnnnnnnnnnnnnnnnnnnnnnnnnnnnnnnnnnnnnnnnnnnnnnnnnnnnnnnnnnnnnnnnnnnnnnnnnnnnnnnnnnnnnnnnnnnnnnnnnnnnnnnnnnnnnnnnnnnnnnnnnnnnnnnnnnnnnnnnnnnnnnnnnnnnnnnnnnnnnnnnnnnnnnnnnnnnnnnnnnnnnnnnnnnnnnnnnnnnnnnnnnnnnnnnnnnnnnnnnnnnnnnnnnnnnnnnnnnnnnnnnnnnnnnnnnnnnnnnnnnnnnnnnnnnnnnnnnnnnnnnnnnnnnnnnnnnnnnnnnnnnnnnnnnnnnnnnnnnnnnnnnnnnnnnnnnnnnnnnnnnnnnnnnnnnnnnnnnnnnnnnnnnnnnnnnnnnnnnnnnnnnnnnnnnnnnnnnnnnnnnnnnnnnnnnnnnnnnnnnnnnnnnnnnnnnnnnnnnnnnnnnnnnnnnnnnnnnnnnnnnnnnnnnnnnnnnnnnnnnnnnnnnnnnnnnnnnnnnnnnnnnnnnnnnnnnnnnnnnnnnnnnnnnnnnnnnnnnnnnnnnnnnnnnnnnnnnnnnnnnnnnnnnnnnnnnnnnnnnnnnnnnnnnnnnnnnnnnnnnnnnnnnnnnnnnnnnnnnnnnnnnnnnnnnnnnnnnnnnnnnnnnnnnnnnnnnnnnnnnnnnnnnnnnnnnnnnnnnnnnnnnnnnnnnnnnnnnnnnnnnnnnnnnnnnnnnnnnnnnnnnnnnnnnnnnnnnnnnnnnnnnnnnnnnnnnnnnnnnnnnnnnnnnnnnnnnnnnnnnnnnnnnnnnnnnnnnnnnnnnnnnnnnnnnnnnnnnnnnnnnnnnnnnnnnnnnnnnnnnnnnnnnnnnnnnnnnnnnnnnnnnnnnnnnnnnnnnnnnnnnnnnnnnnnnnnnnnnnnnnnnnnnnnnnnnnnnnnnnnnnnnnnnnnnnnnnnnnnnnnnnnnnnnnnnnnnnnnnnnnnnnnnnnnnnnnnnnnnnnnnnnnnnnnnnnnnnnnnnnnnnnnnnnnnnnnnnnnnnnnnnnnnnnnnnnnnnnnnnnnnnnnnnnnnnnnnnnnnnnnnnnnnnnnnnnnnnnnnnnnnnnnnnnnnnnnnnnnnnnnnnnnnnnnnnnnnnnnnnnnnnnnnnnnnnnnnnnnnnnnnnnnnnnnnnnnnnnnnnnnnnnnnnnnnnnnnnnnnnnnnnnnnnnnnnnnnnnnnnnnnnnnnnnnnnnnnnnnnnnnnnnnnnnnnnnnnnnnnnnnnnnnnnnnnnnnnnnnnnnnnnnnnnnnnnnnnnnnnnnnnnnnnnnnnnnnnnnnnnnnnnnnnnnnnnnnnnnnnnnnnnnnnnnnnnnnnnnnnnnnnnnnnnnnnnnnnnnnnnnnnnnnnnnnnnnnnnnnnnnnnnnnnnnnnnnnnnnnnnnnnnnnnnnnnnnnnnnnnnnnnnnnnnnnnnnnnnnnnnnnnnnnnnnnnnnnnnnnnnnnnnnnnnnnnnnnnnnnnnnnnnnnnnnnnnnnnnnnnnnnnnnnnnnnnnnnnnnnnnnnnnnnnnnnnnnnnnnnnnnnnnnnnnnnnnnnnnnnnnnnnnnnnnnnnnnnnnnnnnnnnnnnnnnnnnnnnnnnnnnnnnnnnnnnnnnnnnnnnnnnnnnnnnnnnnnnnnnnnnnnnnnnnnnnnnnnnnnnnnnnnnnnnnnnnnnnnnnnnnnnnnnnnnnnnnnnnnnnnnnnnnnnnnnnnnnnnnnnnnnnnnnnnnnnnnnnnnnnnnnnnnnnnnnnnnnnnnnnnnnnnnnnnnnnnnnnnnnnnnnnnnnnnnnnnnnnnnnnnnnnnnnnnnnnnnnnnnnnnnnnnnnnnnnnnnnnnnnnnnnnnnnnnnnnnnnnnnnnnnnnnnnnnnnnnnnnnnnnnnnnnnnnnnnnnnnnnnnnnnnnnnnnnnnnnnnnnnnnnnnnnnnnnnnnnnnnnnnnnnnnnnnnnnnnnnnnnnnnnnnnnnnnnnnnnnnnnnnnnnnnnnnnnnnnnnnnnnnnnnnnnnnnnnnnnnnnnnnnnnnnnnnnnnnnnnnnnnnnnnnnnnnnnnnnnnnnnnnnnnnnnnnnnnnnnnnnnnnnnnnnnnnnnnnnnnnnnnnnnnnnnnnnnnnnnnnnnnnnnnnnnnnnnnnnnnnnnnnnnnnnnnnnnnnnnnnnnnnnnnnnnnnnnnnnnnnnnnnnnnnnnnnnnnnnnnnnnnnnnnnnnnnnnnnnnnnnnnnnnnnnnnnnnnnnnnnnnnnnnnnnnnnnnnnnnnnnnnnnnnnnnnnnnnnnnnnnnnnnnnnnnnnnnnnnnnnnnnnnnnnnnnnnnnnnnnnnnnnnnnnnnnnnnnnnnnnnnnnnnnnnnnnnnnnnnnnnnnnnnnnnnnnnnnnnnnnnnnnnnnnnnnnnnnnnnnnnnnnnnnnnnnnnnnnnnnnnnnnnnnnnnnnnnnnnnnnnnnnnnnnnnnnnnnnnnnnnnnnnnnnnnnnnnnnnnnnnnnnnnnnnnnnnnnnnnnnnnnnnnnnnnnnnnnnnnnnnnnnnnnnnnnnnnnnnnnnnnnnnnnnnnnnnnnnnnnnnnnnnnnnnnnnnnnnnnnnnnnnnnnnnnnnnnnnnnnnnnnnnnnnnnnnnnnnnnnnnnnnnnnnnnnnnnnnnnnnnnnnnnnnnnnnnnnnnnnnnnnnnnnnnnnnnnnnnnnnnnnnnnnnnnnnnnnnnnnnnnnnnnnnnnnnnnnnnnnnnnnnnnnnnnnnnnnnnnnnnnnnnnnnnnnnnnnnnnnnnnnnnnnnnnnnnnnnnnnnnnnnnnnnnnnnnnnnnnnnnnnnnnnnnnnnnnnnnnnnnnnnnnnnnnnnnnnnnnnnnnnnnnnnnnnnnnnnnnnnnnnnnnnnnnnnnnnnnnnnnnnnnnnnnnnnnnnnnnnnnnnnnnnnnnnnnnnnnnnnnnnnnnnnnnnnnnnnnnnnnnnnnnnnnnnnnnnnnnnnnnnnnnnnnnnnnnnnnnnnnnnnnnnnnnnnnnnnnnnnnnnnnnnnnnnnnnnnnnnnnnnnnnnnnnnnnnnnnnnnnnnnnnnnnnnnnnnnnnnnnnnnnnnnnnnnnnnnnnnnnnnnnnnnnnnnnnnnnnnnnnnnnnnnnnnnnnnnnnnnnnnnnnnnnnnnnnnnnnnnnnnnnnnnnnnnnnnnnnnnnnnnnnnnnnnnnnnnnnnnnnnnnnnnnnnnnnnnnnnnnnnnnnnnnnnnnnnnnnnnnnnnnnnnnnnnnnnnnnnnnnnnnnnnnnnnnnnnnnnnnnnnnnnnnnnnnnnnnnnnnnnnnnnnnnnnnnnnnnnnnnnnnnnnnnnnnnnnnnnnnnnnnnnnnnnnnnnnnnnnnnnnnnnnnnnnnnnnnnnnnnnnnnnnnnnnnnnnnnnnnnnnnnnnnnnnnnnnnnnnnnnnnnnnnnnnnnnnnnnnnnnnnnnnnnnnnnnnnnnnnnnnnnnnnnnnnnnnnnnnnnnnnnnnnnnnnnnnnnnnnnnnnnnnnnnnnnnnnnnnnnnnnnnnnnnnnnnnnnnnnnnnnnnnnnnnnnnnnnnnnnnnnnnnnnnnnnnnnnnnnnnnnnnnnnnnnnnnnnnnnnnnnnnnnnnnnnnnnnnnnnnnnnnnnnnnnnnnnnnnnnnnnnnnnnnnnnnnnnnnnnnnnnnnnnnnnnnnnnnnnnnnnnnnnnnnnnnnnnnnnnnnnnnnnnnnnnnnnnnnnnnnnnnnnnnnnnnnnnnnnnnnnnnnnnnnnnnnnnnnnnnnnnnnnnnnnnnnnnnnnnnnnnnnnnnnnnnnnnnnnnnnnnnnnnnnnnnnnnnnnnnnnnnnnnnnnnnnnnnnnnnnnnnnnnnnnnnnnnnnnnnnnnnnnnnnnnnnnnnnnnnnnnnnnnnnnnnnnnnnnnnnnnnnnnnnnnnnnnnnnnnnnnnnnnnnnnnnnnnnnnnnnnnnnnnnnnnnnnnnnnnnnnnnnnnnnnnnnnnnnnnnnnnnnnnnnnnnnnnnnnnnnnnnnnnnnnnnnnnnnnnnnnnnnnnnnnnnnnnnnnnnnnnnnnnnnnnnnnnnnnnnnnnnnnnnnnnnnnnnnnnnnnnnnnnnnnnnnnnnnnnnnnnnnnnnnnnnnnnnnnnnnnnnnnnnnnnnnnnnnnnnnnnnnnnnnnnnnnnnnnnnnnnnnnnnnnnnnnnnnnnnnnnnnnnnnnnnnnnnnnnnnnnnnnnnnnnnnnnnnnnnnnnnnnnnnnnnnnnnnnnnnnnnnnnnnnnnnnnnnnnnnnnnnnnnnnnnnnnnnnnnnnnnnnnnnnnnnnnnnnnnnnnnnnnnnnnnnnnnnnnnnnnnnnnnnnnnnnnnnnnnnnnnnnnnnnnnnnnnnnnnnnnnnnnnnnnnnnnnnnnnnnnnnnnnnnnnnnnnnnnnnnnnnnnnnnnnnnnnnnnnnnnnnnnnnnnnnnnnnnnnnnnnnnnnnnnnnnnnnnnnnnnnnnnnnnnnnnnnnnnnnnnnnnnnnnnnnnnnnnnnnnnnnnnnnnnnnnnnnnnnnnnnnnnnnnnnnnnnnnnnnnnnnnnnnnnnnnnnnnnnnnnnnnnnnnnnnnnnnnnnnnnnnnnnnnnnnnnnnnnnnnnnnnnnnnnnnnnnnnnnnnnnnnnnnnnnnnnnnnnnnnnnnnnnnnnnnnnnnnnnnnnnnnnnnnnnnnnnnnnnnnnnnnnnnnnnnnnnnnnnnnnnnnnnnnnnnnnnnnnnnnnnnnnnnnnnnnnnnnnnnnnnnnnnnnnnnnnnnnnnnnnnnnnnnnnnnnnnnnnnnnnnnnnnnnnnnnnnnnnnnnnnnnnnnnnnnnnnnnnnnnnnnnnnnnnnnnnnnnnnnnnnnnnnnnnnnnnnnnnnnnnnnnnnnnnnnnnnnnnnnnnnnnnnnnnnnnnnnnnnnnnnnnnnnnnnnnnnnnnnnnnnnnnnnnnnnnnnnnnnnnnnnnnnnnnnnnnnnnnnnnnnnnnnnnnnnnnnnnnnnnnnnnnnnnnnnnnnnnnnnnnnnnnnnnnnnnnnnnnnnnnnnnnnnnnnnnnnnnnnnnnnnnnnnnnnnnnnnnnnnnnnnnnnnnnnnnnnnnnnnnnnnnnnnnnnnnnnnnnnnnnnnnnnnnnnnnnnnnnnnnnnnnnnnnnnnnnnnnnnnnnnnnnnnnnnnnnnnnnnnnnnnnnnnnnnnnnnnnnnnnnnnnnnnnnnnnnnnnnnnnnnnnnnnnnnnnnnnnnnnnnnnnnnnnnnnnnnnnnnnnnnnnnnnnnnnnnnnnnnnnnnnnnnnnnnnnnnnnnnnnnnnnnnnnnnnnnnnnnnnnnnnnnnnnnnnnnnnnnnnnnnnnnnnnnnnnnnnnnnnnnnnnnnnnnnnnnnnnnnnnnnnnnnnnnnnnnnnnnnnnnnnnnnnnnnnnnnnnnnnnnnnnnnnnnnnnnnnnnnnnnnnnnnnnnnnnnnnnnnnnnnnnnnnnnnnnnnnnnnnnnnnnnnnnnnnnnnnnnnnnnnnnnnnnnnnnnnnnnnnnnnnnnnnnnnnnnnnnnnnnnnnnnnnnnnnnnnnnnnnnnnnnnnnnnnnnnnnnnnnnnnnnnnnnnnnnnnnnnnnnnnnnnnnnnnnnnnnnnnnnnnnnnnnnnnnnnnnnnnnnnnnnnnnnnnnnnnnnnnnnnnnnnnnnnnnnnnnnnnnnnnnnnnnnnnnnnnnnnnnnnnnnnnnnnnnnnnnnnnnnnnnnnnnnnnnnnnnnnnnnnnnnnnnnnnnnnnnnnnnnnnnnnnnnnnnnnnnnnnnnnnnnnnnnnnnnnnnnnnnnnnnnnnnnnnnnnnnnnnnnnnnnnnnnnnnnnnnnnnnnnnnnnnnnnnnnnnnnnnnnnnnnnnnnnnnnnnnnnnnnnnnnnnnnnnnnnnnnnnnnnnnnnnnnnnnnnnnnnnnnnnnnnnnnnnnnnnnnnnnnnnnnnnnnnnnnnnnnnnnnnnnnnnnnnnnnnnnnnnnnnnnnnnnnnnnnnnnnnnnnnnnnnnnnnnnnnnnnnnnnnnnnnnnnnnnnnnnnnnnnnnnnnnnnnnnnnnnnnnnnnnnnnnnnnnnnnnnnnnnnnnnnnnnnnnnnnnnnnnnnnnnnnnnnnnnnnnnnnnnnnnnnnnnnnnnnnnnnnnnnnnnnnnnnnnnnnnnnnnnnnnnnnnnnnnnnnnnnnnnnnnnnnnnnnnnnnnnnnnnnnnnnnnnnnnnnnnnnnnnnnnnnnnnnnnnnnnnnnnnnnnnnnnnnnnnnnnnnnnnnnnnnnnnnnnnnnnnnnnnnnnnnnnnnnnnnnnnnnnnnnnnnnnnnnnnnnnnnnnnnnnnnnnnnnnnnnnnnnnnnnnnnnnnnnnnnnnnnnnnnnnnnnnnnnnnnnnnnnnnnnnnnnnnnnnnnnnnnnnnnnnnnnnnnnnnnnnnnnnnnnnnnnnnnnnnnnnnnnnnnnnnnnnnnnnnnnnnnnnnnnnnnnnnnnnnnnnnnnnnnnnnnnnnnnnnnnnnnnnnnnnnnnnnnnnnnnnnnnnnnnnnnnnnnnnnnnnnnnnnnnnnnnnnnnnnnnnnnnnnnnnnnnnnnnnnnnnnnnnnnnnnnnnnnnnnnnnnnnnnnnnnnnnnnnnnnnnnnnnnnnnnnnnnnnnnnnnnnnnnnnnnnnnnnnnnnnnnnnnnnnnnnnnnnnnnnnnnnnnnnnnnnnnnnnnnnnnnnnnnnnnnnnnnnnnnnnnnnnnnnnnnnnnnnnnnnnnnnnnnnnnnnnnnnnnnnnnnnnnnnnnnnnnnnnnnnnnnnnnnnnnnnnnnnnnnnnnnnnnnnnnnnnnnnnnnnnnnnnnnnnnnnnnnnnnnnnnnnnnnnnnnnnnnnnnnnnnnnnnnnnnnnnnnnnnnnnnnnnnnnnnnnnnnnnnnnnnnnnnnnnnnnnnnnnnnnnnnnnnnnnnnnnnnnnnnnnnnnnnnnnnnnnnnnnnnnnnnnnnnnnnnnnnnnnnnnnnnnnnnnnnnnnnnnnnnnnnnnnnnnnnnnnnnnnnnnnnnnnnnnnnnnnnnnnnnnnnnnnnnnnnnnnnnnnnnnnnnnnnnnnnnnnnnnnnnnnnnnnnnnnnnnnnnnnnnnnnnnnnnnnnnnnnnnnnnnnnnnnnnnnnnnnnnnnnnnnnnnnnnnnnnnnnnnnnnnnnnnnnnnnnnnnnnnnnnnnnnnnnnnnnnnnnnnnnnnnnnnnnnnnnnnnnnnnnnnnnnnnnnnnnnnnnnnnnnnnnnnnnnnnnnnnnnnnnnnnnnnnnnnnnnnnnnnnnnnnnnnnnnnnnnnnnnnnnnnnnnnnnnnnnnnnnnnnnnnnnnnnnnnnnnnnnnnnnnnnnnnnnnnnnnnnnnnnnnnnnnnnnnnnnnnnnnnnnnnnnnnnnnnnnnnnnnnnnnnnnnnnnnnnnnnnnnnnnnnnnnnnnnnnnnnnnnnnnnnnnnnnnnnnnnnnnnnnnnnnnnnnnnnnnnnnnnnnnnnnnnnnnnnnnnnnnnnnnnnnnnnnnnnnnnnnnnnnnnnnnnnnnnnnnnnnnnnnnnnnnnnnnnnnnnnnnnnnnnnnnnnnnnnnnnnnnnnnnnnnnnnnnnnnnnnnnnnnnnnnnnnnnnnnnnnnnnnnnnnnnnnnnnnnnnnnnnnnnnnnnnnnnnnnnnnnnnnnnnnnnnnnnnnnnnnnnnnnnnnnnnnnnnnnnnnnnnnnnnnnnnnnnnnnnnnnnnnnnnnnnnnnnnnnnnnnnnnnnnnnnnnnnnnnnnnnnnnnnnnnnnnnnnnnnnnnnnnnnnnnnnnnnnnnnnnnnnnnnnnnnnnnnnnnnnnnnnnnnnnnnnnnnnnnnnnnnnnnnnnnnnnnnnnnnnnnnnnnnnnnnnnnnnnnnnnnnnnnnnnnnnnnnnnnnnnnnnnnnnnnnnnnnnnnnnnnnnnnnnnnnnnnnnnnnnnnnnnnnnnnnnnnnnnnnnnnnnnnnnnnnnnnnnnnnnnnnnnnnnnnnnnnnnnnnnnnnnnnnnnnnnnnnnnnnnnnnnnnnnnnnnnnnnnnnnnnnnnnnnnnnnnnnnnnnnnnnnnnnnnnnnnnnnnnnnnnnnnnnnnnnnnnnnnnnnnnnnnnnnnnnnnnnnnnnnnnnnnnnnnnnnnnnnnnnnnnnnnnnnnnnnnnnnnnnnnnnnnnnnnnnnnnnnnnnnnnnnnnnnnnnnnnnnnnnnnnnnnnnnnnnnnnnnnnnnnnnnnnnnnnnnnnnnnnnnnnnnnnnnnnnnnnnnnnnnnnnnnnnnnnnnnnnnnnnnnnnnnnnnnnnnnnnnnnnnnnnnnnnnnnnnnnnnnnnnnnnnnnnnnnnnnnnnnnnnnnnnnnnnnnnnnnnnnnnnnnnnnnnnnnnnnnnnnnnnnnnnnnnnnnnnnnnnnnnnnnnnnnnnnnnnnnnnnnnnnnnnnnnnnnnnnnnnnnnnnnnnnnnnnnnnnnnnnnnnnnnnnnnnnnnnnnnnnnnnnnnnnnnnnnnnnnnnnnnnnnnnnnnnnnnnnnnnnnnnnnnnnnnnnnnnnnnnnnnnnnnnnnnnnnnnnnnnnnnnnnnnnnnnnnnnnnnnnnnnnnnnnnnnnnnnnnnnnnnnnnnnnnnnnnnnnnnnnnnnnnnnnnnnnnnnnnnnnnnnnnnnnnnnnnnnnnnnnnnnnnnnnnnnnnnnnnnnnnnnnnnnnnnnnnnnnnnnnnnnnnnnnnnnnnnnnnnnnnnnnnnnnnnnnnnnnnnnnnnnnnnnnnnnnnnnnnnnnnnnnnnnnnnnnnnnnnnnnnnnnnnnnnnnnnnnnnnnnnnnnnnnnnnnnnnnnnnnnnnnnnnnnnnnnnnnnnnnnnnnnnnnnnnnnnnnnnnnnnnnnnnnnnnnnnnnnnnnnnnnnnnnnnnnnnnnnnnnnnnnnnnnnnnnnnnnnnnnnnnnnnnnnnnnnnnnnnnnnnnnnnnnnnnnnnnnnnnnnnnnnnnnnnnnnnnnnnnnnnnnnnnnnnnnnnnnnnnnnnnnnnnnnnnnnnnnnnnnnnnnnnnnnnnnnnnnnnnnnnnnnnnnnnnnnnnnnnnnnnnnnnnnnnnnnnnnnnnnnnnnnnnnnnnnnnnnnnnnnnnnnnnnnnnnnnnnnnnnnnnnnnnnnnnnnnnnnnnnnnnnnnnnnnnnnnnnnnnnnnnnnnnnnnnnnnnnnnnnnnnnnnnnnnnnnnnnnnnnnnnnnnnnnnnnnnnnnnnnnnnnnnnnnnnnnnnnnnnnnnnnnnnnnnnnnnnnnnnnnnnnnnnnnnnnnnnnnnnnnnnnnnnnnnnnnnnnnnnnnnnnnnnnnnnnnnnnnnnnnnnnnnnnnnnnnnnnnnnnnnnnnnnnnnnnnnnnnnnnnnnnnnnnnnnnnnnnnnnnnnnnnnnnnnnnnnnnnnnnnnnnnnnnnnnnnnnnnnnnnnnnnnnnnnnnnnnnnnnnnnnnnnnnnnnnnnnnnnnnnnnnnnnnnnnnnnnnnnnnnnnnnnnnnnnnnnnnnnnnnnnnnnnnnnnnnnnnnnnnnnnnnnnnnnnnnnnnnnnnnnnnnnnnnnnnnnnnnnnnnnnnnnnnnnnnnnnnnnnnnnnnnnnnnnnnnnnnnnnnnnnnnnnnnnnnnnnnnnnnnnnnnnnnnnnnnnnnnnnnnnnnnnnnnnnnnnnnnnnnnnnnnnnnnnnnnnnnnnnnnnnnnnnnnnnnnnnnnnnnnnnnnnnnnnnnnnnnnnnnnnnnnnnnnnnnnnnnnnnnnnnnnnnnnnnnnnnnnnnnnnnnnnnnnnnnnnnnnnnnnnnnnnnnnnnnnnnnnnnnnnnnnnnnnnnnnnnnnnnnnnnnnnnnnnnnnnnnnnnnnnnnnnnnnnnnnnnnnnnnnnnnnnnnnnnnnnnnnnnnnnnnnnnnnnnnnnnnnnnnnnnnnnnnnnnnnnnnnnnnnnnnnnnnnnnnnnnnnnnnnnnnnnnnnnnnnnnnnnnnnnnnnnnnnnnnnnnnnnnnnnnnnnnnnnnnnnnnnnnnnnnnnnnnnnnnnnnnnnnnnnnnnnnnnnnnnnnnnnnnnnnnnnnnnnnnnnnnnnnnnnnnnnnnnnnnnnnnnnnnnnnnnnnnnnnnnnnnnnnnnnnnnnnnnnnnnnnnnnnnnnnnnnnnnnnnnnnnnnnnnnnnnnnnnnnnnnnnnnnnnnnnnnnnnnnnnnnnnnnnnnnnnnnnnnnnnnnnnnnnnnnnnnnnnnnnnnnnnnnnnnnnnnnnnnnnnnnnnnnnnnnnnnnnnnnnnnnnnnnnnnnnnnnnnnnnnnnnnnnnnnnnnnnnnnnnnnnnnnnnnnnnnnnnnnnnnnnnnnnnnnnnnnnnnnnnnnnnnnnnnnnnnnnnnnnnnnnnnnnnnnnnnnnnnnnnnnnnnnnnnnnnnnnnnnnnnnnnnnnnnnnnnnnnnnnnnnnnnnnnnnnnnnnnnnnnnnnnnnnnnnnnnnnnnnnnnnnnnnnnnnnnnnnnnnnnnnnnnnnnnnnnnnnnnnnnnnnnnnnnnnnnnnnnnnnnnnnnnnnnnnnnnnnnnnnnnnnnnnnnnnnnnnnnnnnnnnnnnnnnnnnnnnnnnnnnnnnnnnnnnnnnnnnnnnnnnnnnnnnnnnnnnnnnnnnnnnnnnnnnnnnnnnnnnnnnnnnnnnnnnnnnnnnnnnnnnnnnnnnnnnnnnnnnnnnnnnnnnnnnnnnnnnnnnnnnnnnnnnnnnnnnnnnnnnnnnnnnnnnnnnnnnnnnnnnnnnnnnnnnnnnnnnnnnnnnnnnnnnnnnnnnnnnnnnnnnnnnnnnnnnnnnnnnnnnnnnnnnnnnnnnnnnnnnnnnnnnnnnnnnnnnnnnnnnnnnnnnnnnnnnnnnnnnnnnnnnnnnnnnnnnnnnnnnnnnnnnnnnnnnnnnnnnnnnnnnnnnnnnnnnnnnnnnnnnnnnnnnnnnnnnnnnnnnnnnnnnnnnnnnnnnnnnnnnnnnnnnnnnnnnnnnnnnnnnnnnnnnnnnnnnnnnnnnnnnnnnnnnnnnnnnnnnnnnnnnnnnnnnnnnnnnnnnnnnnnnnnnnnnnnnnnnnnnnnnnnnnnnnnnnnnnnnnnnnnnnnnnnnnnnnnnnnnnnnnnnnnnnnnnnnnnnnnnnnnnnnnnnnnnnnnnnnnnnnnnnnnnnnnnnnnnnnnnnnnnnnnnnnnnnnnnnnnnnnnnnnnnnnnnnnnnnnnnnnnnnnnnnnnnnnnnnnnnnnnnnnnnnnnnnnnnnnnnnnnnnnnnnnnnnnnnnnnnnnnnnnnnnnnnnnnnnnnnnnnnnnnnnnnnnnnnnnnnnnnnnnnnnnnnnnnnnnnnnnnnnnnnnnnnnnnnnnnnnnnnnnnnnnnnnnnnnnnnnnnnnnnnnnnnnnnnnnnnnnnnnnnnnnnnnnnnnnnnnnnnnnnnnnnnnnnnnnnnnnnnnnnnnnnnnnnnnnnnnnnnnnnnnnnnnnnnnnnnnnnnnnnnnnnnnnnnnnnnnnnnnnnnnnnnnnnnnnnnnnnnnnnnnnnnnnnnnnnnnnnnnnnnnnnnnnnnnnnnnnnnnnnnnnnnnnnnnnnnnnnnnnnnnnnnnnnnnnnnnnnnnnnnnnnnnnnnnnnnnnnnnnnnnnnnnnnnnnnnnnnnnnnnnnnnnnnnnnnnnnnnnnnnnnnnnnnnnnnnnnnnnnnnnnnnnnnnnnnnnnnnnnnnnnnnnnnnnnnnnnnnnnnnnnnnnnnnnnnnnnnnnnnnnnnnnnnnnnnnnnnnnnnnnnnnnnnnnnnnnnnnnnnnnnnnnnnnnnnnnnnnnnnnnnnnnnnnnnnnnnnnnnnnnnnnnnnnnnnnnnnnnnnnnnnnnnnnnnnnnnnnnnnnnnnnnnnnnnnnnnnnnnnnnnnnnnnnnnnnnnnnnnnnnnnnnnnnnnnnnnnnnnnnnnnnnnnnnnnnnnnnnnnnnnnnnnnnnnnnnnnnnnnnnnnnnnnnnnnnnnnnnnnnnnnnnnnnnnnnnnnnnnnnnnnnnnnnnnnnnnnnnnnnnnnnnnnnnnnnnnnnnnnnnnnnnnnnnnnnnnnnnnnnnnnnnnnnnnnnnnnnnnnnnnnnnnnnnnnnnnnnnnnnnnnnnnnnnnnnnnnnnnnnnnnnnnnnnnnnnnnnnnnnnnnnnnnnnnnnnnnnnnnnnnnnnnnnnnnnnnnnnnnnnnnnnnnnnnnnnnnnnnnnnnnnnnnnnnnnnnnnnnnnnnnnnnnnnnnnnnnnnnnnnnnnnnnnnnnnnnnnnnnnnnnnnnnnnnnnnnnnnnnnnnnnnnnnnnnnnnnnnnnnnnnnnnnnnnnnnnnnnnnnnnnnnnnnnnnnnnnnnnnnnnnnnnnnnnnnnnnnnnnnnnnnnnnnnnnnnnnnnnnnnnnnnnnnnnnnnnnnnnnnnnnnnnnnnnnnnnnnnnnnnnnnnnnnnnnnnnnnnnnnnnnnnnnnnnnnnnnnnnnnnnnnnnnnnnnnnnnnnnnnnnnnnnnnnnnnnnnnnnnnnnnnnnnnnnnnnnnnnnnnnnnnnnnnnnnnnnnnnnnnnnnnnnnnnnnnnnnnnnnnnnnnnnnnnnnnnnnnnnnnnnnnnnnnnnnnnnnnnnnnnnnnnnnnnnnnnnnnnnnnnnnnnnnnnnnnnnnnnnnnnnnnnnnnnnnnnnnnnnnnnnnnnnnnnnnnnnnnnnnnnnnnnnnnnnnnnnnnnnnnnnnnnnnnnnnnnnnnnnnnnnnnnnnnnnnnnnnnnnnnnnnnnnnnnnnnnnnnnnnnnnnnnnnnnnnnnnnnnnnnnnnnnnnnnnnnnnnnnnnnnnnnnnnnnnnnnnnnnnnnnnnnnnnnnnnnnnnnnnnnnnnnnnnnnnnnnnnnnnnnnnnnnnnnnnnnnnnnnnnnnnnnnnnnnnnnnnnnnnnnnnnnnnnnnnnnnnnnnnnnnnnnnnnnnnnnnnnnnnnnnnnnnnnnnnnnnnnnnnnnnnnnnnnnnnnnnnnnnnnnnnnnnnnnnnnnnnnnnnnnnnnnnnnnnnnnnnnnnnnnnnnnnnnnnnnnnnnnnnnnnnnnnnnnnnnnnnnnnnnnnnnnnnnnnnnnnnnnnnnnnnnnnnnnnnnnnnnnnnnnnnnnnnnnnnnnnnnnnnnnnnnnnnnnnnnnnnnnnnnnnnnnnnnnnnnnnnnnnnnnnnnnnnnnnnnnnnnnnnnnnnnnnnnnnnnnnnnnnnnnnnnnnnnnnnnnnnnnnnnnnnnnnnnnnnnnnnnnnnnnnnnnnnnnnnnnnnnnnnnnnnnnnnnnnnnnnnnnnnnnnnnnnnnnnnnnnnnnnnnnnnnnnnnnnnnnnnnnnnnnnnnnnnnnnnnnnnnnnnnnnnnnnnnnnnnnnnnnnnnnnnnnnnnnnnnnnnnnnnnnnnnnnnnnnnnnnnnnnnnnnnnnnnnnnnnnnnnnnnnnnnnnnnnnnnnnnnnnnnnnnnnnnnnnnnnnnnnnnnnnnnnnnnnnnnnnnnnnnnnnnnnnnnnnnnnnnnnnnnnnnnnnnnnnnnnnnnnnnnnnnnnnnnnnnnnnnnnnnnnnnnnnnnnnnnnnnnnnnnnnnnnnnnnnnnnnnnnnnnnnnnnnnnnnnnnnnnnnnnnnnnnnnnnnnnnnnnnnnnnnnnnnnnnnnnnnnnnnnnnnnnnnnnnnnnnnnnnnnnnnnnnnnnnnnnnnnnnnnnnnnnnnnnnnnnnnnnnnnnnnnnnnnnnnnnnnnnnnnnnnnnnnnnnnnnnnnnnnnnnnnnnnnnnnnnnnnnnnnnnnnnnnnnnnnnnnnnnnnnnnnnnnnnnnnnnnnnnnnnnnnnnnnnnnnnnnnnnnnnnnnnnnnnnnnnnnnnnnnnnnnnnnnnnnnnnnnnnnnnnnnnnnnnnnnnnnnnnnnnnnnnnnnnnnnnnnnnnnnnnnnnnnnnnnnnnnnnnnnnnnnnnnnnnnnnnnnnnnnnnnnnnnnnnnnnnnnnnnnnnnnnnnnnnnnnnnnnnnnnnnnnnnnnnnnnnnnnnnnnnnnnnnnnnnnnnnnnnnnnnnnnnnnnnnnnnnnnnnnnnnnnnnnnnnnnnnnnnnnnnnnnnnnnnnnnnnnnnnnnnnnnnnnnnnnnnnnnnnnnnnnnnnnnnnnnnnnnnnnnnnnnnnnnnnnnnnnnnnnnnnnnnnnnnnnnnnnnnnnnnnnnnnnnnnnnnnnnnnnnnnnnnnnnnnnnnnnnnnnnnnnnnnnnnnnnnnnnnnnnnnnnnnnnnnnnnnnnnnnnnnnnnnnnnnnnnnnnnnnnnnnnnnnnnnnnnnnnnnnnnnnnnnnnnnnnnnnnnnnnnnnnnnnnnnnnnnnnnnnnnnnnnnnnnnnnnnnnnnnnnnnnnnnnnnnnnnnnnnnnnnnnnnnnnnnnnnnnnnnnnnnnnnnnnnnnnnnnnnnnnnnnnnnnnnnnnnnnnnnnnnnnnnnnnnnnnnnnnnnnnnnnnnnnnnnnnnnnnnnnnnnnnnnnnnnnnnnnnnnnnnnnnnnnnnnnnnnnnnnnnnnnnnnnnnnnnnnnnnnnnnnnnnnnnnnnnnnnnnnnnnnnnnnnnnnnnnnnnnnnnnnnnnnnnnnnnnnnnnnnnnnnnnnnnnnnnnnnnnnnnnnnnnnnnnnnnnnnnnnnnnnnnnnnnnnnnnnnnnnnnnnnnnnnnnnnnnnnnnnnnnnnnnnnnnnnnnnnnnnnnnnnnnnnnnnnnnnnnnnnnnnnnnnnnnnnnnnnnnnnnnnnnnnnnnnnnnnnnnnnnnnnnnnnnnnnnnnnnnnnnnnnnnnnnnnnnnnnnnnnnnnnnnnnnnnnnnnnnnnnnnnnnnnnnnnnnnnnnnnnnnnnnnnnnnnnnnnnnnnnnnnnnnnnnnnnnnnnnnnnnnnnnnnnnnnnnnnnnnnnnnnnnnnnnnnnnnnnnnnnnnnnnnnnnnnnnnnnnnnnnnnnnnnnnnnnnnnnnnnnnnnnnnnnnnnnnnnnnnnnnnnnnnnnnnnnnnnnnnnnnnnnnnnnnnnnnnnnnnnnnnnnnnnnnnnnnnnnnnnnnnnnnnnnnnnnnnnnnnnnnnnnnnnnnnnnnnnnnnnnnnnnnnnnnnnnnnnnnnnnnnnnnnnnnnnnnnnnnnnnnnnnnnnnnnnnnnnnnnnnnnnnnnnnnnnnnnnnnnnnnnnnnnnnnnnnnnnnnnnnnnnnnnnnnnnnnnnnnnnnnnnnnnnnnnnnnnnnnnnnnnnnnnnnnnnnnnnnnnnnnnnnnnnnnnnnnnnnnnnnnnnnnnnnnnnnnnnnnnnnnnnnnnnnnnnnnnnnnnnnnnnnnnnnnnnnnnnnnnnnnnnnnnnnnnnnnnnnnnnnnnnnnnnnnnnnnnnnnnnnnnnnnnnnnnnnnnnnnnnnnnnnnnnnnnnnnnnnnnnnnnnnnnnnnnnnnnnnnnnnnnnnnnnnnnnnnnnnnnnnnnnnnnnnnnnnnnnnnnnnnnnnnnnnnnnnnnnnnnnnnnnnnnnnnnnnnnnnnnnnnnnnnnnnnnnnnnnnnnnnnnnnnnnnnnnnnnnnnnnnnnnnnnnnnnnnnnnnnnnnnnnnnnnnnnnnnnnnnnnnnnnnnnnnnnnnnnnnnnnnnnnnnnnnnnnnnnnnnnnnnnnnnnnnnnnnnnnnnnnnnnnnnnnnnnnnnnnnnnnnnnnnnnnnnnnnnnnnnnnnnnnnnnnnnnnnnnnnnnnnnnnnnnnnnnnnnnnnnnnnnnnnnnnnnnnnnnnnnnnnnnnnnnnnnnnnnnnnnnnnnnnnnnnnnnnnnnnnnnnnnnnnnnnnnnnnnnnnnnnnnnnnnnnnnnnnnnnnnnnnnnnnnnnnnnnnnnnnnnnnnnnnnnnnnnnnnnnnnnnnnnnnnnnnnnnnnnnnnnnnnnnnnnnnnnnnnnnnnnnnnnnnnnnnnnnnnnnnnnnnnnnnnnnnnnnnnnnnnnnnnnnnnnnnnnnnnnnnnnnnnnnnnnnnnnnnnnnnnnnnnnnnnnnnnnnnnnnnnnnnnnnnnnnnnnnnnnnnnnnnnnnnnnnnnnnnnnnnnnnnnnnnnnnnnnnnnnnnnnnnnnnnnnnnnnnnnnnnnnnnnnnnnnnnnnnnnnnnnnnnnnnnnnnnnnnnnnnnnnnnnnnnnnnnnnnnnnnnnnnnnnnnnnnnnnnnnnnnnnnnnnnnnnnnnnnnnnnnnnnnnnnnnnnnnnnnnnnnnnnnnnnnnnnnnnnnnnnnnnnnnnnnnnnnnnnnnnnnnnnnnnnnnnnnnnnnnnnnnnnnnnnnnnnnnnnnnnnnnnnnnnnnnnnnnnnnnnnnnnnnnnnnnnnnnnnnnnnnnnnnnnnnnnnnnnnnnnnnnnnnnnnnnnnnnnnnnnnnnnnnnnnnnnnnnnnnnnnnnnnnnnnnnnnnnnnnnnnnnnnnnnnnnnnnnnnnnnnnnnnnnnnnnnnnnnnnnnnnnnnnnnnnnnnnnnnnnnnnnnnnnnnnnnnnnnnnnnnnnnnnnnnnnnnnnnnnnnnnnnnnnnnnnnnnnnnnnnnnnnnnnnnnnnnnnnnnnnnnnnnnnnnnnnnnnnnnnnnnnnnnnnnnnnnnnnnnnnnnnnnnnnnnnnnnnnnnnnnnnnnnnnnnnnnnnnnnnnnnnnnnnnnnnnnnnnnnnnnnnnnnnnnnnnnnnnnnnnnnnnnnnnnnnnnnnnnnnnnnnnnnnnnnnnnnnnnnnnnnnnnnnnnnnnnnnnnnnnnnnnnnnnnnnnnnnnnnnnnnnnnnnnnnnnnnnnnnnnnnnnnnnnnnnnnnnnnnnnnnnnnnnnnnnnnnnnnnnnnnnnnnnnnnnnnnnnnnnnnnnnnnnnnnnnnnnnnnnnnnnnnnnnnnnnnnnnnnnnnnnnnnnnnnnnnnnnnnnnnnnnnnnnnnnnnnnnnnnnnnnnnnnnnnnnnnnnnnnnnnnnnnnnnnnnnnnnnnnnnnnnnnnnnnnnnnnnnnnnnnnnnnnnnnnnnnnnnnnnnnnnnnnnnnnnnnnnnnnnnnnnnnnnnnnnnnnnnnnnnnnnnnnnnnnnnnnnnnnnnnnnnnnnnnnnnnnnnnnnnnnnnnnnnnnnnnnnnnnnnnnnnnnnnnnnnnnnnnnnnnnnnnnnnnnnnnnnnnnnnnnnnnnnnnnnnnnnnnnnnnnnnnnnnnnnnnnnnnnnnnnnnnnnnnnnnnnnnnnnnnnnnnnnnnnnnnnnnnnnnnnnnnnnnnnnnnnnnnnnnnnnnnnnnnnnnnnnnnnnnnnnnnnnnnnnnnnnnnnnnnnnnnnnnnnnnnnnnnnnnnnnnnnnnnnnnnnnnnnnnnnnnnnnnnnnnnnnnnnnnnnnnnnnnnnnnnnnnnnnnnnnnnnnnnnnnnnnnnnnnnnnnnnnnnnnnnnnnnnnnnnnnnnnnnnnnnnnnnnnnnnnnnnnnnnnnnnnnnnnnnnnnnnnnnnnnnnnnnnnnnnnnnnnnnnnnnnnnnnnnnnnnnnnnnnnnnnnnnnnnnnnnnnnnnnnnnnnnnnnnnnnnnnnnnnnnnnnnnnnnnnnnnnnnnnnnnnnnnnnnnnnnnnnnnnnnnnnnnnnnnnnnnnnnnnnnnnnnnnnnnnnnnnnnnnnnnnnnnnnnnnnnnnnnnnnnnnnnnnnnnnnnnnnnnnnnnnnnnnnnnnnnnnnnnnnnnnnnnnnnnnnnnnnnnnnnnnnnnnnnnnnnnnnnnnnnnnnnnnnnnnnnnnnnnnnnnnnnnnnnnnnnnnnnnnnnnnnnnnnnnnnnnnnnnnnnnnnnnnnnnnnnnnnnnnnnnnnnnnnnnnnnnnnnnnnnnnnnnnnnnnnnnnnnnnnnnnnnnnnnnnnnnnnnnnnnnnnnnnnnnnnnnnnnnnnnnnnnnnnnnnnnnnnnnnnnnnnnnnnnnnnnnnnnnnnnnnnnnnnnnnnnnnnnnnnnnnnnnnnnnnnnnnnnnnnnnnnnnnnnnnnnnnnnnnnnnnnnnnnnnnnnnnnnnnnnnnnnnnnnnnnnnnnnnnnnnnnnnnnnnnnnnnnnnnnnnnnnnnnnnnnnnnnnnnnnnnnnnnnnnnnnnnnnnnnnnnnnnnnnnnnnnnnnnnnnnnnnnnnnnnnnnnnnnnnnnnnnnnnnnnnnnnnnnnnnnnnnnnnnnnnnnnnnnnnnnnnnnnnnnnnnnnnnnnnnnnnnnnnnnnnnnnnnnnnnnnnnnnnnnnnnnnnnnnnnnnnnnnnnnnnnnnnnnnnnnnnnnnnnnnnnnnnnnnnnnnnnnnnnnnnnnnnnnnnnnnnnnnnnnnnnnnnnnnnnnnnnnnnnnnnnnnnnnnnnnnnnnnnnnnnnnnnnnnnnnnnnnnnnnnnnnnnnnnnnnnnnnnnnnnnnnnnnnnnnnnnnnnnnnnnnnnnnnnnnnnnnnnnnnnnnnnnnnnnnnnnnnnnnnnnnnnnnnnnnnnnnnnnnnnnnnnnnnnnnnnnnnnnnnnnnnnnnnnnnnnnnnnnnnnnnnnnnnnnnnnnnnnnnnnnnnnnnnnnnnnnnnnnnnnnnnnnnnnnnnnnnnnnnnnnnnnnnnnnnnnnnnnnnnnnnnnnnnnnnnnnnnnnnnnnnnnnnnnnnnnnnnnnnnnnnnnnnnnnnnnnnnnnnnnnnnnnnnnnnnnnnnnnnnnnnnnnnnnnnnnnnnnnnnnnnnnnnnnnnnnnnnnnnnnnnnnnnnnnnnnnnnnnnnnnnnnnnnnnnnnnnnnnnnnnnnnnnnnnnnnnnnnnnnnnnnnnnnnnnnnnnnnnnnnnnnnnnnnnnnnnnnnnnnnnnnnnnnnnnnnnnnnnnnnnnnnnnnnnnnnnnnnnnnnnnnnnnnnnnnnnnnnnnnnnnnnnnnnnnnnnnnnnnnnnnnnnnnnnnnnnnnnnnnnnnnnnnnnnnnnnnnnnnnnnnnnnnnnnnnnnnnnnnnnnnnnnnnnnnnnnnnnnnnnnnnnnnnnnnnnnnnnnnnnnnnnnnnnnnnnnnnnnnnnnnnnnnnnnnnnnnnnnnnnnnnnnnnnnnnnnnnnnnnnnnnnnnnnnnnnnnnnnnnnnnnnnnnnnnnnnnnnnnnnnnnnnnnnnnnnnnnnnnnnnnnnnnnnnnnnnnnnnnnnnnnnnnnnnnnnnnnnnnnnnnnnnnnnnnnnnnnnnnnnnnnnnnnnnnnnnnnnnnnnnnnnnnnnnnnnnnnnnnnnnnnnnnnnnnnnnnnnnnnnnnnnnnnnnnnnnnnnnnnnnnnnnnnnnnnnnnnnnnnnnnnnnnnnnnnnnnnnnnnnnnnnnnnnnnnnnnnnnnnnnnnnnnnnnnnnnnnnnnnnnnnnnnnnnnnnnnnnnnnnnnnnnnnnnnnnnnnnnnnnnnnnnnnnnnnnnnnnnnnnnnnnnnnnnnnnnnnnnnnnnnnnnnnnnnnnnnnnnnnnnnnnnnnnnnnnnnnnnnnnnnnnnnnnnnnnnnnnnnnnnnnnnnnnnnnnnnnnnnnnnnnnnnnnnnnnnnnnnnnnnnnnnnnnnnnnnnnnnnnnnnnnnnnnnnnnnnnnnnnnnnnnnnnnnnnnnnnnnnnnnnnnnnnnnnnnnnnnnnnnnnnnnnnnnnnnnnnnnnnnnnnnnnnnnnnnnnnnnnnnnnnnnnnnnnnnnnnnnnnnnnnnnnnnnnnnnnnnnnnnnnnnnnnnnnnnnnnnnnnnnnnnnnnnnnnnnnnnnnnnnnnnnnnnnnnnnnnnnnnnnnnnnnnnnnnnnnnnnnnnnnnnnnnnnnnnnnnnnnnnnnnnnnnnnnnnnnnnnnnnnnnnnnnnnnnnnnnnnnnnnnnnnnnnnnnnnnnnnnnnnnnnnnnnnnnnnnnnnnnnnnnnnnnnnnnnnnnnnnnnnnnnnnnnnnnnnnnnnnnnnnnnnnnnnnnnnnnnnnnnnnnnnnnnnnnnnnnnnnnnnnnnnnnnnnnnnnnnnnnnnnnnnnnnnnnnnnnnnnnnnnnnnnnnnnnnnnnnnnnnnnnnnnnnnnnnnnnnnnnnnnnnnnnnnnnnnnnnnnnnnnnnnnnnnnnnnnnnnnnnnnnnnnnnnnnnnnnnnnnnnnnnnnnnnnnnnnnnnnnnnnnnnnnnnnnnnnnnnnnnnnnnnnnnnnnnnnnnnnnnnnnnnnnnnnnnnnnnnnnnnnnnnnnnnnnnnnnnnnnnnnnnnnnnnnnnnnnnnnnnnnnnnnnnnnnnnnnnnnnnnnnnnnnnnnnnnnnnnnnnnnnnnnnnnnnnnnnnnnnnnnnnnnnnnnnnnnnnnnnnnnnnnnnnnnnnnnnnnnnnnnnnnnnnnnnnnnnnnnnnnnnnnnnnnnnnnnnnnnnnnnnnnnnnnnnnnnnnnnnnnnnnnnnnnnnnnnnnnnnnnnnnnnnnnnnnnnnnnnnnnnnnnnnnnnnnnnnnnnnnnnnnnnnnnnnnnnnnnnnnnnnnnnnnnnnnnnnnnnnnnnnnnnnnnnnnnnnnnnnnnnnnnnnnnnnnnnnnnnnnnnnnnnnnnnnnnnnnnnnnnnnnnnnnnnnnnnnnnnnnnnnnnnnnnnnnnnnnnnnnnnnnnnnnnnnnnnnnnnnnnnnnnnnnnnnnnnnnnnnnnnnnnnnnnnnnnnnnnnnnnnnnnnnnnnnnnnnnnnnnnnnnnnnnnnnnnnnnnnnnnnnnnnnnnnnnnnnnnnnnnnnnnnnnnnnnnnnnnnnnnnnnnnnnnnnnnnnnnnnnnnnnnnnnnnnnnnnnnnnnnnnnnnnnnnnnnnnnnnnnnnnnnnnnnnnnnnnnnnnnnnnnnnnnnnnnnnnnnnnnnnnnnnnnnnnnnnnnnnnnnnnnnnnnnnnnnnnnnnnnnnnnnnnnnnnnnnnnnnnnnnnnnnnnnnnnnnnnnnnnnnnnnnnnnnnnnnnnnnnnnnnnnnnnnnnnnnnnnnnnnnnnnnnnnnnnnnnnnnnnnnnnnnnnnnnnnnnnnnnnnnnnnnnnnnnnnnnnnnnnnnnnnnnnnnnnnnnnnnnnnnnnnnnnnnnnnnnnnnnnnnnnnnnnnnnnnnnnnnnnnnnnnnnnnnnnnnnnnnnnnnnnnnnnnnnnnnnnnnnnnnnnnnnnnnnnnnnnnnnnnnnnnnnnnnnnnnnnnnnnnnnnnnnnnnnnnnnnnnnnnnnnnnnnnnnnnnnnnnnnnnnnnnnnnnnnnnnnnnnnnnnnnnnnnnnnnnnnnnnnnnnnnnnnnnnnnnnnnnnnnnnnnnnnnnnnnnnnnnnnnnnnnnnnnnnnnnnnnnnnnnnnnnnnnnnnnnnnnnnnnnnnnnnnnnnnnnnnnnnnnnnnnnnnnnnnnnnnnnnnnnnnnnnnnnnnnnnnnnnnnnnnnnnnnnnnnnnnnnnnnnnnnnnnnnnnnnnnnnnnnnnnnnnnnnnnnnnnnnnnnnnnnnnnnnnnnnnnnnnnnnnnnnnnnnnnnnnnnnnnnnnnnnnnnnnnnnnnnnnnnnnnnnnnnnnnnnnnnnnnnnnnnnnnnnnnnnnnnnnnnnnnnnnnnnnnnnnnnnnnnnnnnnnnnnnnnnnnnnnnnnnnnnnnnnnnnnnnnnnnnnnnnnnnnnnnnnnnnnnnnnnnnnnnnnnnnnnnnnnnnnnnnnnnnnnnnnnnnnnnnnnnnnnnnnnnnnnnnnnnnnnnnnnnnnnnnnnnnnnnnnnnnnnnnnnnnnnnnnnnnnnnnnnnnnnnnnnnnnnnnnnnnnnnnnnnnnnnnnnnnnnnnnnnnnnnnnnnnnnnnnnnnnnnnnnnnnnnnnnnnnnnnnnnnnnnnnnnnnnnnnnnnnnnnnnnnnnnnnnnnnnnnnnnnnnnnnnnnnnnnnnnnnnnnnnnnnnnnnnnnnnnnnnnnnnnnnnnnnnnnnnnnnnnnnnnnnnnnnnnnnnnnnnnnnnnnnnnnnnnnnnnnnnnnnnnnnnnnnnnnnnnnnnnnnnnnnnnnnnnnnnnnnnnnnnnnnnnnnnnnnnnnnnnnnnnnnnnnnnnnnnnnnnnnnnnnnnnnnnnnnnnnnnnnnnnnnnnnnnnnnnnnnnnnnnnnnnnnnnnnnnnnnnnnnnnnnnnnnnnnnnnnnnnnnnnnnnnnnnnnnnnnnnnnnnnnnnnnnnnnnnnnnnnnnnnnnnnnnnnnnnnnnnnnnnnnnnnnnnnnnnnnnnnnnnnnnnnnnnnnnnnnnnnnnnnnnnnnnnnnnnnnnnnnnnnnnnnnnnnnnnnnnnnnnnnnnnnnnnnnnnnnnnnnnnnnnnnnnnnnnnnnnnnnnnnnnnnnnnnnnnnnnnnnnnnnnnnnnnnnnnnnnnnnnnnnnnnnnnnnnnnnnnnnnnnnnnnnnnnnnnnnnnnnnnnnnnnnnnnnnnnnnnnnnnnnnnnnnnnnnnnnnnnnnnnnnnnnnnnnnnnnnnnnnnnnnnnnnnnnnnnnnnnnnnnnnnnnnnnnnnnnnnnnnnnnnnnnnnnnnnnnnnnnnnnnnnnnnnnnnnnnnnnnnnnnnnnnnnnnnnnnnnnnnnnnnnnnnnnnnnnnnnnnnnnnnnnnnnnnnnnnnnnnnnnnnnnnnnnnnnnnnnnnnnnnnnnnnnnnnnnnnnnnnnnnnnnnnnnnnnnnnnnnnnnnnnnnnnnnnnnnnnnnnnnnnnnnnnnnnnnnnnnnnnnnnnnnnnnnnnnnnnnnnnnnnnnnnnnnnnnnnnnnnnnnnnnnnnnnnnnnnnnnnnnnnnnnnnnnnnnnnnnnnnnnnnnnnnnnnnnnnnnnnnnnnnnnnnnnnnnnnnnnnnnnnnnnnnnnnnnnnnnnnnnnnnnnnnnnnnnnnnnnnnnnnnnnnnnnnnnnnnnnnnnnnnnnnnnnnnnnnnnnnnnnnnnnnnnnnnnnnnnnnnnnnnnnnnnnnnnnnnnnnnnnnnnnnnnnnnnnnnnnnnnnnnnnnnnnnnnnnnnnnnnnnnnnnnnnnnnnnnnnnnnnnnnnnnnnnnnnnnnnnnnnnnnnnnnnnnnnnnnnnnnnnnnnnnnnnnnnnnnnnnnnnnnnnnnnnnnnnnnnnnnnnnnnnnnnnnnnnnnnnnnnnnnnnnnnnnnnnnnnnnnnnnnnnnnnnnnnnnnnnnnnnnnnnnnnnnnnnnnnnnnnnnnnnnnnnnnnnnnnnnnnnnnnnnnnnnnnnnnnnnnnnnnnnnnnnnnnnnnnnnnnnnnnnnnnnnnnnnnnnnnnnnnnnnnnnnnnnnnnnnnnnnnnnnnnnnnnnnnnnnnnnnnnnnnnnnnnnnnnnnnnnnnnnnnnnnnnnnnnnnnnnnnnnnnnnnnnnnnnnnnnnnnnnnnnnnnnnnnnnnnnnnnnnnnnnnnnnnnnnnnnnnnnnnnnnnnnnnnnnnnnnnnnnnnnnnnnnnnnnnnnnnnnnnnnnnnnnnnnnnnnnnnnnnnnnnnnnnnnnnnnnnnnnnnnnnnnnnnnnnnnnnnnnnnnnnnnnnnnnnnnnnnnnnnnnnnnnnnnnnnnnnnnnnnnnnnnnnnnnnnnnnnnnnnnnnnnnnnnnnnnnnnnnnnnnnnnnnnnnnnnnnnnnnnnnnnnnnnnnnnnnnnnnnnnnnnnnnnnnnnnnnnnnnnnnnnnnnnnnnnnnnnnnnnnnnnnnnnnnnnnnnnnnnnnnnnnnnnnnnnnnnnnnnnnnnnnnnnnnnnnnnnnnnnnnnnnnnnnnnnnnnnnnnnnnnnnnnnnnnnnnnnnnnnnnnnnnnnnnnnnnnnnnnnnnnnnnnnnnnnnnnnnnnnnnnnnnnnnnnnnnnnnnnnnnnnnnnnnnnnnnnnnnnnnnnnnnnnnnnnnnnnnnnnnnnnnnnnnnnnnnnnnnnnnnnnnnnnnnnnnnnnnnnnnnnnnnnnnnnnnnnnnnnnnnnnnnnnnnnnnnnnnnnnnnnnnnnnnnnnnnnnnnnnnnnnnnnnnnnnnnnnnnnnnnnnnnnnnnnnnnnnnnnnnnnnnnnnnnnnnnnnnnnnnnnnnnnnnnnnnnnnnnnnnnnnnnnnnnnnnnnnnnnnnnnnnnnnnnnnnnnnnnnnnnnnnnnnnnnnnnnnnnnnnnnnnnnnnnnnnnnnnnnnnnnnnnnnnnnnnnnnnnnnnnnnnnnnnnnnnnnnnnnnnnnnnnnnnnnnnnnnnnnnnnnnnnnnnnnnnnnnnnnnnnnnnnnnnnnnnnnnnnnnnnnnnnnnnnnnnnnnnnnnnnnnnnnnnnnnnnnnnnnnnnnnnnnnnnnnnnnnnnnnnnnnnnnnnnnnnnnnnnnnnnnnnnnnnnnnnnnnnnnnnnnnnnnnnnnnnnnnnnnnnnnnnnnnnnnnnnnnnnnnnnnnnnnnnnnnnnnnnnnnnnnnnnnnnnnnnnnnnnnnnnnnnnnnnnnnnnnnnnnnnnnnnnnnnnnnnnnnnnnnnnnnnnnnnnnnnnnnnnnnnnnnnnnnnnnnnnnnnnnnnnnnnnnnnnnnnnnnnnnnnnnnnnnnnnnnnnnnnnnnnnnnnnnnnnnnnnnnnnnnnnnnnnnnnnnnnnnnnnnnnnnnnnnnnnnnnnnnnnnnnnnnnnnnnnnnnnnnnnnnnnnnnnnnnnnnnnnnnnnnnnnnnnnnnnnnnnnnnnnnnnnnnnnnnnnnnnnnnnnnnnnnnnnnnnnnnnnnnnnnnnnnnnnnnnnnnnnnnnnnnnnnnnnnnnnnnnnnnnnnnnnnnnnnnnnnnnnnnnnnnnnnnnnnnnnnnnnnnnnnnnnnnnnnnnnnnnnnnnnnnnnnnnnnnnnnnnnnnnnnnnnnnnnnnnnnnnnnnnnnnnnnnnnnnnnnnnnnnnnnnnnnnnnnnnnnnnnnnnnnnnnnnnnnnnnnnnnnnnnnnnnnnnnnnnnnnnnnnnnnnnnnnnnnnnnnnnnnnnnnnnnnnnnnnnnnnnnnnnnnnnnnnnnnnnnnnnnnnnnnnnnnnnnnnnnnnnnnnnnnnnnnnnnnnnnnnnnnnnnnnnnnnnnnnnnnnnnnnnnnnnnnnnnnnnnnnnnnnnnnnnnnnnnnnnnnnnnnnnnnnnnnnnnnnnnnnnnnnnnnnnnnnnnnnnnnnnnnnnnnnnnnnnnnnnnnnnnnnnnnnnnnnnnnnnnnnnnnnnnnnnnnnnnnnnnnnnnnnnnnnnnnnnnnnnnnnnnnnnnnnnnnnnnnnnnnnnnnnnnnnnnnnnnnnnnnnnnnnnnnnnnnnnnnnnnnnnnnnnnnnnnnnnnnnnnnnnnnnnnnnnnnnnnnnnnnnnnnnnnnnnnnnnnnnnnnnnnnnnnnnnnnnnnnnnnnnnnnnnnnnnnnnnnnnnnnnnnnnnnnnnnnnnnnnnnnnnnnnnnnnnnnnnnnnnnnnnnnnnnnnnnnnnnnnnnnnnnnnnnnnnnnnnnnnnnnnnnnnnnnnnnnnnnnnnnnnnnnnnnnnnnnnnnnnnnnnnnnnnnnnnnnnnnnnnnnnnnnnnnnnnnnnnnnnnnnnnnnnnnnnnnnnnnnnnnnnnnnnnnnnnnnnnnnnnnnnnnnnnnnnnnnnnnnnnnnnnnnnnnnnnnnnnnnnnnnnnnnnnnnnnnnnnnnnnnnnnnnnnnnnnnnnnnnnnnnnnnnnnnnnnnnnnnnnnnnnnnnnnnnnnnnnnnnnnnnnnnnnnnnnnnnnnnnnnnnnnnnnnnnnnnnnnnnnnnnnnnnnnnnnnnnnnnnnnnnnnnnnnnnnnnnnnnnnnnnnnnnnnnnnnnnnnnnnnnnnnnnnnnnnnnnnnnnnnnnnnnnnnnnnnnnnnnnnnnnnnnnnnnnnnnnnnnnnnnnnnnnnnnnnnnnnnnnnnnnnnnnnnnnnnnnnnnnnnnnnnnnnnnnnnnnnnnnnnnnnnnnnnnnnnnnnnnnnnnnnnnnnnnnnnnnnnnnnnnnnnnnnnnnnnnnnnnnnnnnnnnnnnnnnnnnnnnnnnnnnnnnnnnnnnnnnnnnnnnnnnnnnnnnnnnnnnnnnnnnnnnnnnnnnnnnnnnnnnnnnnnnnnnnnnnnnnnnnnnnnnnnnnnnnnnnnnnnnnnnnnnnnnnnnnnnnnnnnnnnnnnnnnnnnnnnnnnnnnnnnnnnnnnnnnnnnnnnnnnnnnnnnnnnnnnnnnnnnnnnnnnnnnnnnnnnnnnnnnnnnnnnnnnnnnnnnnnnnnnnnnnnnnnnnnnnnnnnnnnnnnnnnnnnnnnnnnnnnnnnnnnnnnnnnnnnnnnnnnnnnnnnnnnnnnnnnnnnnnnnnnnnnnnnnnnnnnnnnnnnnnnnnnnnnnnnnnnnnnnnnnnnnnnnnnnnnnnnnnnnnnnnnnnnnnnnnnnnnnnnnnnnnnnnnnnnnnnnnnnnnnnnnnnnnnnnnnnnnnnnnnnnnnnnnnnnnnnnnnnnnnnnnnnnnnnnnnnnnnnnnnnnnnnnnnnnnnnnnnnnnnnnnnnnnnnnnnnnnnnnnnnnnnnnnnnnnnnnnnnnnnnnnnnnnnnnnnnnnnnnnnnnnnnnnnnnnnnnnnnnnnnnnnnnnnnnnnnnnnnnnnnnnnnnnnnnnnnnnnnnnnnnnnnnnnnnnnnnnnnnnnnnnnnnnnnnnnnnnnnnnnnnnnnnnnnnnnnnnnnnnnnnnnnnnnnnnnnnnnnnnnnnnnnnnnnnnnnnnnnnnnnnnnnnnnnnnnnnnnnnnnnnnnnnnnnnnnnnnnnnnnnnnnnnnnnnnnnnnnnnnnnnnnnnnnnnnnnnnnnnnnnnnnnnnnnnnnnnnnnnnnnnnnnnnnnnnnnnnnnnnnnnnnnnnnnnnnnnnnnnnnnnnnnnnnnnnnnnnnnnnnnnnnnnnnnnnnnnnnnnnnnnnnnnnnnnnnnnnnnnnnnnnnnnnnnnnnnnnnnnnnnnnnnnnnnnnnnnnnnnnnnnnnnnnnnnnnnnnnnnnnnnnnnnnnnnnnnnnnnnnnnnnnnnnnnnnnnnnnnnnnnnnnnnnnnnnnnnnnnnnnnnnnnnnnnnnnnnnnnnnnnnnnnnnnnnnnnnnnnnnnnnnnnnnnnnnnnnnnnnnnnnnnnnnnnnnnnnnnnnnnnnnnnnnnnnnnnnnnnnnnnnnnnnnnnnnnnnnnnnnnnnnnnnnnnnnnnnnnnnnnnnnnnnnnnnnnnnnnnnnnnnnnnnnnnnnnnnnnnnnnnnnnnnnnnnnnnnnnnnnnnnnnnnnnnnnnnnnnnnnnnnnnnnnnnnnnnnnnnnnnnnnnnnnnnnnnnnnnnnnnnnnnnnnnnnnnnnnnnnnnnnnnnnnnnnnnnnnnnnnnnnnnnnnnnnnnnnnnnnnnnnnnnnnnnnnnnnnnnnnnnnnnnnnnnnnnnnnnnnnnnnnnnnnnnnnnnnnnnnnnnnnnnnnnnnnnnnnnnnnnnnnnnnnnnnnnnnnnnnnnnnnnnnnnnnnnnnnnnnnnnnnnnnnnnnnnnnnnnnnnnnnnnnnnnnnnnnnnnnnnnnnnnnnnnnnnnnnnnnnnnnnnnnnnnnnnnnnnnnnnnnnnnnnnnnnnnnnnnnnnnnnnnnnnnnnnnnnnnnnnnnnnnnnnnnnnnnnnnnnnnnnnnnnnnnnnnnnnnnnnnnnnnnnnnnnnnnnnnnnnnnnnnnnnnnnnnnnnnnnnnnnnnnnnnnnnnnnnnnnnnnnnnnnnnnnnnnnnnnnnnnnnnnnnnnnnnnnnnnnnnnnnnnnnnnnnnnnnnnnnnnnnnnnnnnnnnnnnnnnnnnnnnnnnnnnnnnnnnnnnnnnnnnnnnnnnnnnnnnnnnnnnnnnnnnnnnnnnnnnnnnnnnnnnnnnnnnnnnnnnnnnnnnnnnnnnnnnnnnnnnnnnnnnnnnnnnnnnnnnnnnnnnnnnnnnnnnnnnnnnnnnnnnnnnnnnnnnnnnnnnnnnnnnnnnnnnnnnnnnnnnnnnnnnnnnnnnnnnnnnnnnnnnnnnnnnnnnnnnnnnnnnnnnnnnnnnnnnnnnnnnnnnnnnnnnnnnnnnnnnnnnnnnnnnnnnnnnnnnnnnnnnnnnnnnnnnnnnnnnnnnnnnnnnnnnnnnnnnnnnnnnnnnnnnnnnnnnnnnnnnnnnnnnnnnnnnnnnnnnnnnnnnnnnnnnnnnnnnnnnnnnnnnnnnnnnnnnnnnnnnnnnnnnnnnnnnnnnnnnnnnnnnnnnnnnnnnnnnnnnnnnnnnnnnnnnnnnnnnnnnnnnnnnnnnnnnnnnnnnnnnnnnnnnnnnnnnnnnnnnnnnnnnnnnnnnnnnnnnnnnnnnnnnnnnnnnnnnnnnnnnnnnnnnnnnnnnnnnnnnnnnnnnnnnnnnnnnnnnnnnnnnnnnnnnnnnnnnnnnnnnnnnnnnnnnnnnnnnnnnnnnnnnnnnnnnnnnnnnnnnnnnnnnnnnnnnnnnnnnnnnnnnnnnnnnnnnnnnnnnnnnnnnnnnnnnnnnnnnnnnnnnnnnnnnnnnnnnnnnnnnnnnnnnnnnnnnnnnnnnnnnnnnnnnnnnnnnnnnnnnnnnnnnnnnnnnnnnnnnnnnnnnnnnnnnnnnnnnnnnnnnnnnnnnnnnnnnnnnnnnnnnnnnnnnnnnnnnnnnnnnnnnnnnnnnnnnnnnnnnnnnnnnnnnnnnnnnnnnnnnnnnnnnnnnnnnnnnnnnnnnnnnnnnnnnnnnnnnnnnnnnnnnnnnnnnnnnnnnnnnnnnnnnnnnnnnnnnnnnnnnnnnnnnnnnnnnnnnnnnnnnnnnnnnnnnnnnnnnnnnnnnnnnnnnnnnnnnnnnnnnnnnnnnnnnnnnnnnnnnnnnnnnnnnnnnnnnnnnnnnnnnnnnnnnnnnnnnnnnnnnnnnnnnnnnnnnnnnnnnnnnnnnnnnnnnnnnnnnnnnnnnnnnnnnnnnnnnnnnnnnnnnnnnnnnnnnnnnnnnnnnnnnnnnnnnnnnnnnnnnnnnnnnnnnnnnnnnnnnnnnnnnnnnnnnnnnnnnnnnnnnnnnnnnnnnnnnnnnnnnnnnnnnnnnnnnnnnnnnnnnnnnnnnnnnnnnnnnnnnnnnnnnnnnnnnnnnnnnnnnnnnnnnnnnnnnnnnnnnnnnnnnnnnnnnnnnnnnnnnnnnnnnnnnnnnnnnnnnnnnnnnnnnnnnnnnnnnnnnnnnnnnnnnnnnnnnnnnnnnnnnnnnnnnnnnnnnnnnnnnnnnnnnnnnnnnnnnnnnnnnnnnnnnnnnnnnnnnnnnnnnnnnnnnnnnnnnnnnnnnnnnnnnnnnnnnnnnnnnnnnnnnnnnnnnnnnnnnnnnnnnnnnnnnnnnnnnnnnnnnnnnnnnnnnnnnnnnnnnnnnnnnnnnnnnnnnnnnnnnnnnnnnnnnnnnnnnnnnnnnnnnnnnnnnnnnnnnnnnnnnnnnnnnnnnnnnnnnnnnnnnnnnnnnnnnnnnnnnnnnnnnnnnnnnnnnnnnnnnnnnnnnnnnnnnnnnnnnnnnnnnnnnnnnnnnnnnnnnnnnnnnnnnnnnnnnnnnnnnnnnnnnnnnnnnnnnnnnnnnnnnnnnnnnnnnnnnnnnnnnnnnnnnnnnnnnnnnnnnnnnnnnnnnnnnnnnnnnnnnnnnnnnnnnnnnnnnnnnnnnnnnnnnnnnnnnnnnnnnnnnnnnnnnnnnnnnnnnnnnnnnnnnnnnnnnnnnnnnnnnnnnnnnnnnnnnnnnnnnnnnnnnnnnnnnnnnnnnnnnnnnnnnnnnnnnnnnnnnnnnnnnnnnnnnnnnnnnnnnnnnnnnnnnnnnnnnnnnnnnnnnnnnnnnnnnnnnnnnnnnnnnnnnnnnnnnnnnnnnnnnnnnnnnnnnnnnnnnnnnnnnnnnnnnnnnnnnnnnnnnnnnnnnnnnnnnnnnnnnnnnnnnnnnnnnnnnnnnnnnnnnnnnnnnnnnnnnnnnnnnnnnnnnnnnnnnnnnnnnnnnnnnnnnnnnnnnnnnnnnnnnnnnnnnnnnnnnnnnnnnnnnnnnnnnnnnnnnnnnnnnnnnnnnnnnnnnnnnnnnnnnnnnnnnnnnnnnnnnnnnnnnnnnnnnnnnnnnnnnnnnnnnnnnnnnnnnnnnnnnnnnnnnnnnnnnnnnnnnnnnnnnnnnnnnnnnnnnnnnnnnnnnnnnnnnnnnnnnnnnnnnnnnnnnnnnnnnnnnnnnnnnnnnnnnnnnnnnnnnnnnnnnnnnnnnnnnnnnnnnnnnnnnnnnnnnnnnnnnnnnnnnnnnnnnnnnnnnnnnnnnnnnnnnnnnnnnnnnnnnnnnnnnnnnnnnnnnnnnnnnnnnnnnnnnnnnnnnnnnnnnnnnnnnnnnnnnnnnnnnnnnnnnnnnnnnnnnnnnnnnnnnnnnnnnnnnnnnnnnnnnnnnnnnnnnnnnnnnnnnnnnnnnnnnnnnnnnnnnnnnnnnnnnnnnnnnnnnnnnnnnnnnnnnnnnnnnnnnnnnnnnnnnnnnnnnnnnnnnnnnnnnnnnnnnnnnnnnnnnnnnnnnnnnnnnnnnnnnnnnnnnnnnnnnnnnnnnnnnnnnnnnnnnnnnnnnnnnnnnnnnnnnnnnnnnnnnnnnnnnnnnnnnnnnnnnnnnnnnnnnnnnnnnnnnnnnnnnnnnnnnnnnnnnnnnnnnnnnnnnnnnnnnnnnnnnnnnnnnnnnnnnnnnnnnnnnnnnnnnnnnnnnnnnnnnnnnnnnnnnnnnnnnnnnnnnnnnnnnnnnnnnnnnnnnnnnnnnnnnnnnnnnnnnnnnnnnnnnnnnnnnnnnnnnnnnnnnnnnnnnnnnnnnnnnnnnnnnnnnnnnnnnnnnnnnnnnnnnnnnnnnnnnnnnnnnnnnnnnnnnnnnnnnnnnnnnnnnnnnnnnnnnnnnnnnnnnnnnnnnnnnnnnnnnnnnnnnnnnnnnnnnnnnnnnnnnnnnnnnnnnnnnnnnnnnnnnnnnnnnnnnnnnnnnnnnnnnnnnnnnnnnnnnnnnnnnnnnnnnnnnnnnnnnnnnnnnnnnnnnnnnnnnnnnnnnnnnnnnnnnnnnnnnnnnnnnnnnnnnnnnnnnnnnnnnnnnnnnnnnnnnnnnnnnnnnnnnnnnnnnnnnnnnnnnnnnnnnnnnnnnnnnnnnnnnnnnnnnnnnnnnnnnnnnnnnnnnnnnnnnnnnnnnnnnnnnnnnnnnnnnnnnnnnnnnnnnnnnnnnnnnnnnnnnnnnnnnnnnnnnnnnnnnnnnnnnnnnnnnnnnnnnnnnnnnnnnnnnnnnnnnnnnnnnnnnnnnnnnnnnnnnnnnnnnnnnnnnnnnnnnnnnnnnnnnnnnnnnnnnnnnnnnnnnnnnnnnnnnnnnnnnnnnnnnnnnnnnnnnnnnnnnnnnnnnnnnnnnnnnnnnnnnnnnnnnnnnnnnnnnnnnnnnnnnnnnnnnnnnnnnnnnnnnnnnnnnnnnnnnnnnnnnnnnnnnnnnnnnnnnnnnnnnnnnnnnnnnnnnnnnnnnnnnnnnnnnnnnnnnnnnnnnnnnnnnnnnnnnnnnnnnnnnnnnnnnnnnnnnnnnnnnnnnnnnnnnnnnnnnnnnnnnnnnnnnnnnnnnnnnnnnnnnnnnnnnnnnnnnnnnnnnnnnnnnnnnnnnnnnnnnnnnnnnnnnnnnnnnnnnnnnnnnnnnnnnnnnnnnnnnnnnnnnnnnnnnnnnnnnnnnnnnnnnnnnnnnnnnnnnnnnnnnnnnnnnnnnnnnnnnnnnnnnnnnnnnnnnnnnnnnnnnnnnnnnnnnnnnnnnnnnnnnnnnnnnnnnnnnnnnnnnnnnnnnnnnnnnnnnnnnnnnnnnnnnnnnnnnnnnnnnnnnnnnnnnnnnnnnnnnnnnnnnnnnnnnnnnnnnnnnnnnnnnnnnnnnnnnnnnnnnnnnnnnnnnnnnnnnnnnnnnnnnnnnnnnnnnnnnnnnnnnnnnnnnnnnnnnnnnnnnnnnnnnnnnnnnnnnnnnnnnnnnnnnnnnnnnnnnnnnnnnnnnnnnnnnnnnnnnnnnnnnnnnnnnnnnnnnnnnnnnnnnnnnnnnnnnnnnnnnnnnnnnnnnnnnnnnnnnnnnnnnnnnnnnnnnnnnnnnnnnnnnnnnnnnnnnnnnnnnnnnnnnnnnnnnnnnnnnnnnnnnnnnnnnnnnnnnnnnnnnnnnnnnnnnnnnnnnnnnnnnnnnnnnnnnnnnnnnnnnnnnnnnnnnnnnnnnnnnnnnnnnnnnnnnnnnnnnnnnnnnnnnnnnnnnnnnnnnnnnnnnnnnnnnnnnnnnnnnnnnnnnnnnnnnnnnnnnnnnnnnnnnnnnnnnnnnnnnnnnnnnnnnnnnnnnnnnnnnnnnnnnnnnnnnnnnnnnnnnnnnnnnnnnnnnnnnnnnnnnnnnnnnnnnnnnnnnnnnnnnnnnnnnnnnnnnnnnnnnnnnnnnnnnnnnnnnnnnnnnnnnnnnnnnnnnnnnnnnnnnnnnnnnnnnnnnnnnnnnnnnnnnnnnnnnnnnnnnnnnnnnnnnnnnnnnnnnnnnnnnnnnnnnnnnnnnnnnnnnnnnnnnnnnnnnnnnnnnnnnnnnnnnnnnnnnnnnnnnnnnnnnnnnnnnnnnnnnnnnnnnnnnnnnnnnnnnnnnnnnnnnnnnnnnnnnnnnnnnnnnnnnnnnnnnnnnnnnnnnnnnnnnnnnnnnnnnnnnnnnnnnnnnnnnnnnnnnnnnnnnnnnnnnnnnnnnnnnnnnnnnnnnnnnnnnnnnnnnnnnnnnnnnnnnnnnnnnnnnnnnnnnnnnnnnnnnnnnnnnnnnnnnnnnnnnnnnnnnnnnnnnnnnnnnnnnnnnnnnnnnnnnnnnnnnnnnnnnnnnnnnnnnnnnnnnnnnnnnnnnnnnnnnnnnnnnnnnnnnnnnnnnnnnnnnnnnnnnnnnnnnnnnnnnnnnnnnnnnnnnnnnnnnnnnnnnnnnnnnnnnnnnnnnnnnnnnnnnnnnnnnnnnnnnnnnnnnnnnnnnnnnnnnnnnnnnnnnnnnnnnnnnnnnnnnnnnnnnnnnnnnnnnnnnnnnnnnnnnnnnnnnnnnnnnnnnnnnnnnnnnnnnnnnnnnnnnnnnnnnnnnnnnnnnnnnnnnnnnnnnnnnnnnnnnnnnnnnnnnnnnnnnnnnnnnnnnnnnnnnnnnnnnnnnnnnnnnnnnnnnnnnnnnnnnnnnnnnnnnnnnnnnnnnnnnnnnnnnnnnnnnnnnnnnnnnnnnnnnnnnnnnnnnnnnnnnnnnnnnnnnnnnnnnnnnnnnnnnnnnnnnnnnnnnnnnnnnnnnnnnnnnnnnnnnnnnnnnnnnnnnnnnnnnnnnnnnnnnnnnnnnnnnnnnnnnnnnnnnnnnnnnnnnnnnnnnnnnnnnnnnnnnnnnnnnnnnnnnnnnnnnnnnnnnnnnnnnnnnnnnnnnnnnnnnnnnnnnnnnnnnnnnnnnnnnnnnnnnnnnnnnnnnnnnnnnnnnnnnnnnnnnnnnnnnnnnnnnnnnnnnnnnnnnnnnnnnnnnnnnnnnnnnnnnnnnnnnnnnnnnnnnnnnnnnnnnnnnnnnnnnnnnnnnnnnnnnnnnnnnnnnnnnnnnnnnnnnnnnnnnnnnnnnnnnnnnnnnnnnnnnnnnnnnnnnnnnnnnnnnnnnnnnnnnnnnnnnnnnnnnnnnnnnnnnnnnnnnnnnnnnnnnnnnnnnnnnnnnnnnnnnnnnnnnnnnnnnnnnnnnnnnnnnnnnnnnnnnnnnnnnnnnnnnnnnnnnnnnnnnnnnnnnnnnnnnnnnnnnnnnnnnnnnnnnnnnnnnnnnnnnnnnnnnnnnnnnnnnnnnnnnnnnnnnnnnnnnnnnnnnnnnnnnnnnnnnnnnnnnnnnnnnnnnnnnnnnnnnnnnnnnnnnnnnnnnnnnnnnnnnnnnnnnnnnnnnnnnnnnnnnnnnnnnnnnnnnnnnnnnnnnnnnnnnnnnnnnnnnnnnnnnnnnnnnnnnnnnnnnnnnnnnnnnnnnnnnnnnnnnnnnnnnnnnnnnnnnnnnnnnnnnnnnnnnnnnnnnnnnnnnnnnnnnnnnnnnnnnnnnnnnnnnnnnnnnnnnnnnnnnnnnnnnnnnnnnnnnnnnnnnnnnnnnnnnnnnnnnnnnnnnnnnnnnnnnnnnnnnnnnnnnnnnnnnnnnnnnnnnnnnnnnnnnnnnnnnnnnnnnnnnnnnnnnnnnnnnnnnnnnnnnnnnnnnnnnnnnnnnnnnnnnnnnnnnnnnnnnnnnnnnnnnnnnnnnnnnnnnnnnnnnnnnnnnnnnnnnnnnnnnnnnnnnnnnnnnnnnnnnnnnnnnnnnnnnnnnnnnnnnnnnnnnnnnnnnnnnnnnnnnnnnnnnnnnnnnnnnnnnnnnnnnnnnnnnnnnnnnnnnnnnnnnnnnnnnnnnnnnnnnnnnnnnnnnnnnnnnnnnnnnnnnnnnnnnnnnnnnnnnnnnnnnnnnnnnnnnnnnnnnnnnnnnnnnnnnnnnnnnnnnnnnnnnnnnnnnnnnnnnnnnnnnnnnnnnnnnnnnnnnnnnnnnnnnnnnnnnnnnnnnnnnnnnnnnnnnnnnnnnnnnnnnnnnnnnnnnnnnnnnnnnnnnnnnnnnnnnnnnnnnnnnnnnnnnnnnnnnnnnnnnnnnnnnnnnnnnnnnnnnnnnnnnnnnnnnnnnnnnnnnnnnnnnnnnnnnnnnnnnnnnnnnnnnnnnnnnnnnnnnnnnnnnnnnnnnnnnnnnnnnnnnnnnnnnnnnnnnnnnnnnnnnnnnnnnnnnnnnnnnnnnnnnnnnnnnnnnnnnnnnnnnnnnnnnnnnnnnnnnnnnnnnnnnnnnnnnnnnnnnnnnnnnnnnnnnnnnnnnnnnnnnnnnnnnnnnnnnnnnnnnnnnnnnnnnnnnnnnnnnnnnnnnnnnnnnnnnnnnnnnnnnnnnnnnnnnnnnnnnnnnnnnnnnnnnnnnnnnnnnnnnnnnnnnnnnnnnnnnnnnnnnnnnnnnnnnnnnnnnnnnnnnnnnnnnnnnnnnnnnnnnnnnnnnnnnnnnnnnnnnnnnnnnnnnnnnnnnnnnnnnnnnnnnnnnnnnnnnnnnnnnnnnnnnnnnnnnnnnnnnnnnnnnnnnnnnnnnnnnnnnnnnnnnnnnnnnnnnnnnnnnnnnnnnnnnnnnnnnnnnnnnnnnnnnnnnnnnnnnnnnnnnnnnnnnnnnnnnnnnnnnnnnnnnnnnnnnnnnnnnnnnnnnnnnnnnnnnnnnnnnnnnnnnnnnnnnnnnnnnnnnnnnnnnnnnnnnnnnnnnnnnnnnnnnnnnnnnnnnnnnnnnnnnnnnnnnnnnnnnnnnnnnnnnnnnnnnnnnnnnnnnnnnnnnnnnnnnnnnnnnnnnnnnnnnnnnnnnnnnnnnnnnnnnnnnnnnnnnnnnnnnnnnnnnnnnnnnnnnnnnnnnnnnnnnnnnnnnnnnnnnnnnnnnnnnnnnnnnnnnnnnnnnnnnnnnnnnnnnnnnnnnnnnnnnnnnnnnnnnnnnnnnnnnnnnnnnnnnnnnnnnnnnnnnnnnnnnnnnnnnnnnnnnnnnnnnnnnnnnnnnnnnnnnnnnnnnnnnnnnnnnnnnnnnnnnnnnnnnnnnnnnnnnnnnnnnnnnnnnnnnnnnnnnnnnnnnnnnnnnnnnnnnnnnnnnnnnnnnnnnnnnnnnnnnnnnnnnnnnnnnnnnnnnnnnnnnnnnnnnnnnnnnnnnnnnnnnnnnnnnnnnnnnnnnnnnnnnnnnnnnnnnnnnnnnnnnnnnnnnnnnnnnnnnnnnnnnnnnnnnnnnnnnnnnnnnnnnnnnnnnnnnnnnnnnnnnnnnnnnnnnnnnnnnnnnnnnnnnnnnnnnnnnnnnnnnnnnnnnnnnnnnnnnnnnnnnnnnnnnnnnnnnnnnnnnnnnnnnnnnnnnnnnnnnnnnnnnnnnnnnnnnnnnnnnnnnnnnnnnnnnnnnnnnnnnnnnnnnnnnnnnnnnnnnnnnnnnnnnnnnnnnnnnnnnnnnnnnnnnnnnnnnnnnnnnnnnnnnnnnnnnnnnnnnnnnnnnnnnnnnnnnnnnnnnnnnnnnnnnnnnnnnnnnnnnnnnnnnnnnnnnnnnnnnnnnnnnnnnnnnnnnnnnnnnnnnnnnnnnnnnnnnnnnnnnnnnnnnnnnnnnnnnnnnnnnnnnnnnnnnnnnnnnnnnnnnnnnnnnnnnnnnnnnnnnnnnnnnnnnnnnnnnnnnnnnnnnnnnnnnnnnnnnnnnnnnnnnnnnnnnnnnnnnnnnnnnnnnnnnnnnnnnnnnnnnnnnnnnnnnnnnnnnnnnnnnnnnnnnnnnnnnnnnnnnnnnnnnnnnnnnnnnnnnnnnnnnnnnnnnnnnnnnnnnnnnnnnnnnnnnnnnnnnnnnnnnnnnnnnnnnnnnnnnnnnnnnnnnnnnnnnnnnnnnnnnnnnnnnnnnnnnnnnnnnnnnnnnnnnnnnnnnnnnnnnnnnnnnnnnnnnnnnnnnnnnnnnnnnnnnnnnnnnnnnnnnnnnnnnnnnnnnnnnnnnnnnnnnnnnnnnnnnnnnnnnnnnnnnnnnnnnnnnnnnnnnnnnnnnnnnnnnnnnnnnnnnnnnnnnnnnnnnnnnnnnnnnnnnnnnnnnnnnnnnnnnnnnnnnnnnnnnnnnnnnnnnnnnnnnnnnnnnnnnnnnnnnnnnnnnnnnnnnnnnnnnnnnnnnnnnnnnnnnnnnnnnnnnnnnnnnnnnnnnnnnnnnnnnnnnnnnnnnnnnnnnnnnnnnnnnnnnnnnnnnnnnnnnnnnnnnnnnnnnnnnnnnnnnnnnnnnnnnnnnnnnnnnnnnnnnnnnnnnnnnnnnnnnnnnnnnnnnnnnnnnnnnnnnnnnnnnnnnnnnnnnnnnnnnnnnnnnnnnnnnnnnnnnnnnnnnnnnnnnnnnnnnnnnnnnnnnnnnnnnnnnnnnnnnnnnnnnnnnnnnnnnnnnnnnnnnnnnnnnnnnnnnnnnnnnnnnnnnnnnnnnnnnnnnnnnnnnnnnnnnnnnnnnnnnnnnnnnnnnnnnnnnnnnnnnnnnnnnnnnnnnnnnnnnnnnnnnnnnnnnnnnnnnnnnnnnnnnnnnnnnnnnnnnnnnnnnnnnnnnnnnnnnnnnnnnnnnnnnnnnnnnnnnnnnnnnnnnnnnnnnnnnnnnnnnnnnnnnnnnnnnnnnnnnnnnnnnnnnnnnnnnnnnnnnnnnnnnnnnnnnnnnnnnnnnnnnnnnnnnnnnnnnnnnnnnnnnnnnnnnnnnnnnnnnnnnnnnnnnnnnnnnnnnnnnnnnnnnnnnnnnnnnnnnnnnnnnnnnnnnnnnnnnnnnnnnnnnnnnnnnnnnnnnnnnnnnnnnnnnnnnnnnnnnnnnnnnnnnnnnnnnnnnnnnnnnnnnnnnnnnnnnnnnnnnnnnnnnnnnnnnnnnnnnnnnnnnnnnnnnnnnnnnnnnnnnnnnnnnnnnnnnnnnnnnnnnnnnnnnnnnnnnnnnnnnnnnnnnnnnnnnnnnnnnnnnnnnnnnnnnnnnnnnnnnnnnnnnnnnnnnnnnnnnnnnnnnnnnnnnnnnnnnnnnnnnnnnnnnnnnnnnnnnnnnnnnnnnnnnnnnnnnnnnnnnnnnnnnnnnnnnnnnnnnnnnnnnnnnnnnnnnnnnnnnnnnnnnnnnnnnnnnnnnnnnnnnnnnnnnnnnnnnnnnnnnnnnnnnnnnnnnnnnnnnnnnnnnnnnnnnnnnnnnnnnnnnnnnnnnnnnnnnnnnnnnnnnnnnnnnnnnnnnnnnnnnnnnnnnnnnnnnnnnnnnnnnnnnnnnnnnnnnnnnnnnnnnnnnnnnnnnnnnnnnnnnnnnnnnnnnnnnnnnnnnnnnnnnnnnnnnnnnnnnnnnnnnnnnnnnnnnnnnnnnnnnnnnnnnnnnnnnnnnnnnnnnnnnnnnnnnnnnnnnnnnnnnnnnnnnnnnnnnnnnnnnnnnnnnnnnnnnnnnnnnnnnnnnnnnnnnnnnnnnnnnnnnnnnnnnnnnnnnnnnnnnnnnnnnnnnnnnnnnnnnnnnnnnnnnnnnnnnnnnnnnnnnnnnnnnnnnnnnnnnnnnnnnnnnnnnnnnnnnnnnnnnnnnnnnnnnnnnnnnnnnnnnnnnnnnnnnnnnnnnnnnnnnnnnnnnnnnnnnnnnnnnnnnnnnnnnnnnnnnnnnnnnnnnnnnnnnnnnnnnnnnnnnnnnnnnnnnnnnnnnnnnnnnnnnnnnnnnnnnnnnnnnnnnnnnnnnnnnnnnnnnnnnnnnnnnnnnnnnnnnnnnnnnnnnnnnnnnnnnnnnnnnnnnnnnnnnnnnnnnnnnnnnnnnnnnnnnnnnnnnnnnnnnnnnnnnnnnnnnnnnnnnnnnnnnnnnnnnnnnnnnnnnnnnnnnnnnnnnnnnnnnnnnnnnnnnnnnnnnnnnnnnnnnnnnnnnnnnnnnnnnnnnnnnnnnnnnnnnnnnnnnnnnnnnnnnnnnnnnnnnnnnnnnnnnnnnnnnnnnnnnnnnnnnnnnnnnnnnnnnnnnnnnnnnnnnnnnnnnnnnnnnnnnnnnnnnnnnnnnnnnnnnnnnnnnnnnnnnnnnnnnnnnnnnnnnnnnnnnnnnnnnnnnnnnnnnnnnnnnnnnnnnnnnnnnnnnnnnnnnnnnnnnnnnnnnnnnnnnnnnnnnnnnnnnnnnnnnnnnnnnnnnnnnnnnnnnnnnnnnnnnnnnnnnnnnnnnnnnnnnnnnnnnnnnnnnnnnnnnnnnnnnnnnnnnnnnnnnnnnnnnnnnnnnnnnnnnnnnnnnnnnnnnnnnnnnnnnnnnnnnnnnnnnnnnnnnnnnnnnnnnnnnnnnnnnnnnnnnnnnnnnnnnnnnnnnnnnnnnnnnnnnnnnnnnnnnnnnnnnnnnnnnnnnnnnnnnnnnnnnnnnnnnnnnnnnnnnnnnnnnnnnnnnnnnnnnnnnnnnnnnnnnnnnnnnnnnnnnnnnnnnnnnnnnnnnnnnnnnnnnnnnnnnnnnnnnnnnnnnnnnnnnnnnnnnnnnnnnnnnnnnnnnnnnnnnnnnnnnnnnnnnnnnnnnnnnnnnnnnnnnnnnnnnnnnnnnnnnnnnnnnnnnnnnnnnnnnnnnnnnnnnnnnnnnnnnnnnnnnnnnnnnnnnnnnnnnnnnnnnnnnnnnnnnnnnnnnnnnnnnnnnnnnnnnnnnnnnnnnnnnnnnnnnnnnnnnnnnnnnnnnnnnnnnnnnnnnnnnnnnnnnnnnnnnnnnnnnnnnnnnnnnnnnnnnnnnnnnnnnnnnnnnnnnnnnnnnnnnnnnnnnnnnnnnnnnnnnnnnnnnnnnnnnnnnnnnnnnnnnnnnnnnnnnnnnnnnnnnnnnnnnnnnnnnnnnnnnnnnnnnnnnnnnnnnnnnnnnnnnnnnnnnnnnnnnnnnnnnnnnnnnnnnnnnnnnnnnnnnnnnnnnnnnnnnnnnnnnnnnnnnnnnnnnnnnnnnnnnnnnnnnnnnnnnnnnnnnnnnnnnnnnnnnnnnnnnnnnnnnnnnnnnnnnnnnnnnnnnnnnnnnnnnnnnnnnnnnnnnnnnnnnnnnnnnnnnnnnnnnnnnnnnnnnnnnnnnnnnnnnnnnnnnnnnnnnnnnnnnnnnnnnnnnnnnnnnnnnnnnnnnnnnnnnnnnnnnnnnnnnnnnnnnnnnnnnnnnnnnnnnnnnnnnnnnnnnnnnnnnnnnnnnnnnnnnnnnnnnnnnnnnnnnnnnnnnnnnnnnnnnnnnnnnnnnnnnnnnnnnnnnnnnnnnnnnnnnnnnnnnnnnnnnnnnnnnnnnnnnnnnnnnnnnnnnnnnnnnnnnnnnnnnnnnnnnnnnnnnnnnnnnnnnnnnnnnnnnnnnnnnnnnnnnnnnnnnnnnnnnnnnnnnnnnnnnnnnnnnnnnnnnnnnnnnnnnnnnnnnnnnnnnnnnnnnnnnnnnnnnnnnnnnnnnnnnnnnnnnnnnnnnnnnnnnnnnnnnnnnnnnnnnnnnnnnnnnnnnnnnnnnnnnnnnnnnnnnnnnnnnnnnnnnnnnnnnnnnnnnnnnnnnnnnnnnnnnnnnnnnnnnnnnnnnnnnnnnnnnnnnnnnnnnnnnnnnnnnnnnnnnnnnnnnnnnnnnnnnnnnnnnnnnnnnnnnnnnnnnnnnnnnnnnnnnnnnnnnnnnnnnnnnnnnnnnnnnnnnnnnnnnnnnnnnnnnnnnnnnnnnnnnnnnnnnnnnnnnnnnnnnnnnnnnnnnnnnnnnnnnnnnnnnnnnnnnnnnnnnnnnnnnnnnnnnnnnnnnnnnnnnnnnnnnnnnnnnnnnnnnnnnnnnnnnnnnnnnnnnnnnnnnnnnnnnnnnnnnnnnnnnnnnnnnnnnnnnnnnnnnnnnnnnnnnnnnnnnnnnnnnnnnnnnnnnnnnnnnnnnnnnnnnnnnnnnnnnnnnnnnnnnnnnnnnnnnnnnnnnnnnnnnnnnnnnnnnnnnnnnnnnnnnnnnnnnnnnnnnnnnnnnnnnnnnnnnnnnnnnnnnnnnnnnnnnnnnnnnnnnnnnnnnnnnnnnnnnnnnnnnnnnnnnnnnnnnnnnnnnnnnnnnnnnnnnnnnnnnnnnnnnnnnnnnnnnnnnnnnnnnnnnnnnnnnnnnnnnnnnnnnnnnnnnnnnnnnnnnnnnnnnnnnnnnnnnnnnnnnnnnnnnnnnnnnnnnnnnnnnnnnnnnnnnnnnnnnnnnnnnnnnnnnnnnnnnnnnnnnnnnnnnnnnnnnnnnnnnnnnnnnnnnnnnnnnnnnnnnnnnnnnnnnnnnnnnnnnnnnnnnnnnnnnnnnnnnnnnnnnnnnnnnnnnnnnnnnnnnnnnnnnnnnnnnnnnnnnnnnnnnnnnnnnnnnnnnnnnnnnnnnnnnnnnnnnnnnnnnnnnnnnnnnnnnnnnnnnnnnnnnnnnnnnnnnnnnnnnnnnnnnnnnnnnnnnnnnnnnnnnnnnnnnnnnnnnnnnnnnnnnnnnnnnnnnnnnnnnnnnnnnnnnnnnnnnnnnnnnnnnnnnnnnnnnnnnnnnnnnnnnnnnnnnnnnnnnnnnnnnnnnnnnnnnnnnnnnnnnnnnnnnnnnnnnnnnnnnnnnnnnnnnnnnnnnnnnnnnnnnnnnnnnnnnnnnnnnnnnnnnnnnnnnnnnnnnnnnnnnnnnnnnnnnnnnnnnnnnnnnnnnnnnnnnnnnnnnnnnnnnnnnnnnnnnnnnnnnnnnnnnnnnnnnnnnnnnnnnnnnnnnnnnnnnnnnnnnnnnnnnnnnnnnnnnnnnnnnnnnnnnnnnnnnnnnnnnnnnnnnnnnnnnnnnnnnnnnnnnnnnnnnnnnnnnnnnnnnnnnnnnnnnnnnnnnnnnnnnnnnnnnnnnnnnnnnnnnnnnnnnnnnnnnnnnnnnnnnnnnnnnnnnnnnnnnnnnnnnnnnnnnnnnnnnnnnnnnnnnnnnnnnnnnnnnnnnnnnnnnnnnnnnnnnnnnnnnnnnnnnnnnnnnnnnnnnnnnnnnnnnnnnnnnnnnnnnnnnnnnnnnnnnnnnnnnnnnnnnnnnnnnnnnnnnnnnnnnnnnnnnnnnnnnnnnnnnnnnnnnnnnnnnnnnnnnnnnnnnnnnnnnnnnnnnnnnnnnnnnnnnnnnnnnnnnnnnnnnnnnnnnnnnnnnnnnnnnnnnnnnnnnnnnnnnnnnnnnnnnnnnnnnnnnnnnnnnnnnnnnnnnnnnnnnnnnnnnnnnnnnnnnnnnnnnnnnnnnnnnnnnnnnnnnnnnnnnnnnnnnnnnnnnnnnnnnnnnnnnnnnnnnnnnnnnnnnnnnnnnnnnnnnnnnnnnnnnnnnnnnnnnnnnnnnnnnnnnnnnnnnnnnnnnnnnnnnnnnnnnnnnnnnnnnnnnnnnnnnnnnnnnnnnnnnnnnnnnnnnnnnnnnnnnnnnnnnnnnnnnnnnnnnnnnnnnnnnnnnnnnnnnnnnnnnnnnnnnnnnnnnnnnnnnnnnnnnnnnnnnnnnnnnnnnnnnnnnnnnnnnnnnnnnnnnnnnnnnnnnnnnnnnnnnnnnnnnnnnnnnnnnnnnnnnnnnnnnnnnnnnnnnnnnnnnnnnnnnnnnnnnnnnnnnnnnnnnnnnnnnnnnnnnnnnnnnnnnnnnnnnnnnnnnnnnnnnnnnnnnnnnnnnnnnnnnnnnnnnnnnnnnnnnnnnnnnnnnnnnnnnnnnnnnnnnnnnnnnnnnnnnnnnnnnnnnnnnnnnnnnnnnnnnnnnnnnnnnnnnnnnnnnnnnnnnnnnnnnnnnnnnnnnnnnnnnnnnnnnnnnnnnnnnnnnnnnnnnnnnnnnnnnnnnnnnnnnnnnnnnnnnnnnnnnnnnnnnnnnnnnnnnnnnnnnnnnnnnnnnnnnnnnnnnnnnnnnnnnnnnnnnnnnnnnnnnnnnnnnnnnnnnnnnnnnnnnnnnnnnnnnnnnnnnnnnnnnnnnnnnnnnnnnnnnnnnnnnnnnnnnnnnnnnnnnnnnnnnnnnnnnnnnnnnnnnnnnnnnnnnnnnnnnnnnnnnnnnnnnnnnnnnnnnnnnnnnnnnnnnnnnnnnnnnnnnnnnnnnnnnnnnnnnnnnnnnnnnnnnnnnnnnnnnnnnnnnnnnnnnnnnnnnnnnnnnnnnnnnnnnnnnnnnnnnnnnnnnnnnnnnnnnnnnnnnnnnnnnnnnnnnnnnnnnnnnnnnnnnnnnnnnnnnnnnnnnnnnnnnnnnnnnnnnnnnnnnnnnnnnnnnnnnnnnnnnnnnnnnnnnnnnnnnnnnnnnnnnnnnnnnnnnnnnnnnnnnnnnnnnnnnnnnnnnnnnnnnnnnnnnnnnnnnnnnnnnnnnnnnnnnnnnnnnnnnnnnnnnnnnnnnnnnnnnnnnnnnnnnnnnnnnnnnnnnnnnnnnnnnnnnnnnnnnnnnnnnnnnnnnnnnnnnnnnnnnnnnnnnnnnnnnnnnnnnnnnnnnnnnnnnnnnnnnnnnnnnnnnnnnnnnnnnnnnnnnnnnnnnnnnnnnnnnnnnnnnnnnnnnnnnnnnnnnnnnnnnnnnnnnnnnnnnnnnnnnnnnnnnnnnnnnnnnnnnnnnnnnnnnnnnnnnnnnnnnnnnnnnnnnnnnnnnnnnnnnnnnnnnnnnnnnnnnnnnnnnnnnnnnnnnnnnnnnnnnnnnnnnnnnnnnnnnnnnnnnnnnnnnnnnnnnnnnnnnnnnnnnnnnnnnnnnnnnnnnnnnnnnnnnnnnnnnnnnnnnnnnnnnnnnnnnnnnnnnnnnnnnnnnnnnnnnnnnnnnnnnnnnnnnnnnnnnnnnnnnnnnnnnnnnnnnnnnnnnnnnnnnnnnnnnnnnnnnnnnnnnnnnnnnnnnnnnnnnnnnnnnnnnnnnnnnnnnnnnnnnnnnnnnnnnnnnnnnnnnnnnnnnnnnnnnnnnnnnnnnnnnnnnnnnnnnnnnnnnnnnnnnnnnnnnnnnnnnnnnnnnnnnnnnnnnnnnnnnnnnnnnnnnnnnnnnnnnnnnnnnnnnnnnnnnnnnnnnnnnnnnnnnnnnnnnnnnnnnnnnnnnnnnnnnnnnnnnnnnnnnnnnnnnnnnnnnnnnnnnnnnnnnnnnnnnnnnnnnnnnnnnnnnnnnnnnnnnnnnnnnnnnnnnnnnnnnnnnnnnnnnnnnnnnnnnnnnnnnnnnnnnnnnnnnnnnnnnnnnnnnnnnnnnnnnnnnnnnnnnnnnnnnnnnnnnnnnnnnnnnnnnnnnnnnnnnnnnnnnnnnnnnnnnnnnnnnnnnnnnnnnnnnnnnnnnnnnnnnnnnnnnnnnnnnnnnnnnnnnnnnnnnnnnnnnnnnnnnnnnnnnnnnnnnnnnnnnnnnnnnnnnnnnnnnnnnnnnnnnnnnnnnnnnnnnnnnnnnnnnnnnnnnnnnnnnnnnnnnnnnnnnnnnnnnnnnnnnnnnnnnnnnnnnnnnnnnnnnnnnnnnnnnnnnnnnnnnnnnnnnnnnnnnnnnnnnnnnnnnnnnnnnnnnnnnnnnnnnnnnnnnnnnnnnnnnnnnnnnnnnnnnnnnnnnnnnnnnnnnnnnnnnnnnnnnnnnnnnnnnnnnnnnnnnnnnnnnnnnnnnnnnnnnnnnnnnnnnnnnnnnnnnnnnnnnnnnnnnnnnnnnnnnnnnnnnnnnnnnnnnnnnnnnnnnnnnnnnnnnnnnnnnnnnnnnnnnnnnnnnnnnnnnnnnnnnnnnnnnnnnnnnnnnnnnnnnnnnnnnnnnnnnnnnnnnnnnnnnnnnnnnnnnnnnnnnnnnnnnnnnnnnnnnnnnnnnnnnnnnnnnnnnnnnnnnnnnnnnnnnnnnnnnnnnnnnnnnnnnnnnnnnnnnnnnnnnnnnnnnnnnnnnnnnnnnnnnnnnnnnnnnnnnnnnnnnnnnnnnnnnnnnnnnnnnnnnnnnnnnnnnnnnnnnnnnnnnnnnnnnnnnnnnnnnnnnnnnnnnnnnnnnnnnnnnnnnnnnnnnnnnnnnnnnnnnnnnnnnnnnnnnnnnnnnnnnnnnnnnnnnnnnnnnnnnnnnnnnnnnnnnnnnnnnnnnnnnnnnnnnnnnnnnnnnnnnnnnnnnnnnnnnnnnnnnnnnnnnnnnnnnnnnnnnnnnnnnnnnnnnnnnnnnnnnnnnnnnnnnnnnnnnnnnnnnnnnnnnnnnnnnnnnnnnnnnnnnnnnnnnnnnnnnnnnnnnnnnnnnnnnnnnnnnnnnnnnnnnnnnnnnnnnnnnnnnnnnnnnnnnnnnnnnnnnnnnnnnnnnnnnnnnnnnnnnnnnnnnnnnnnnnnnnnnnnnnnnnnnnnnnnnnnnnnnnnnnnnnnnnnnnnnnnnnnnnnnnnnnnnnnnnnnnnnnnnnnnnnnnnnnnnnnnnnnnnnnnnnnnnnnnnnnnnnnnnnnnnnnnnnnnnnnnnnnnnnnnnnnnnnnnnnnnnnnnnnnnnnnnnnnnnnnnnnnnnnnnnnnnnnnnnnnnnnnnnnnnnnnnnnnnnnnnnnnnnnnnnnnnnnnnnnnnnnnnnnnnnnnnnnnnnnnnnnnnnnnnnnnnnnnnnnnnnnnnnnnnnnnnnnnnnnnnnnnnnnnnnnnnnnnnnnnnnnnnnnnnnnnnnnnnnnnnnnnnnnnnnnnnnnnnnnnnnnnnnnnnnnnnnnnnnnnnnnnnnnnnnnnnnnnnnnnnnnnnnnnnnnnnnnnnnnnnnnnnnnnnnnnnnnnnnnnnnnnnnnnnnnnnnnnnnnnnnnnnnnnnnnnnnnnnnnnnnnnnnnnnnnnnnnnnnnnnnnnnnnnnnnnnnnnnnnnnnnnnnnnnnnnnnnnnnnnnnnnnnnnnnnnnnnnnnnnnnnnnnnnnnnnnnnnnnnnnnnnnnnnnnnnnnnnnnnnnnnnnnnnnnnnnnnnnnnnnnnnnnnnnnnnnnnnnnnnnnnnnnnnnnnnnnnnnnnnnnnnnnnnnnnnnnnnnnnnnnnnnnnnnnnnnnnnnnnnnnnnnnnnnnnnnnnnnnnnnnnnnnnnnnnnnnnnnnnnnnnnnnnnnnnnnnnnnnnnnnnnnnnnnnnnnnnnnnnnnnnnnnnnnnnnnnnnnnnnnnnnnnnnnnnnnnnnnnnnnnnnnnnnnnnnnnnnnnnnnnnnnnnnnnnnnnnnnnnnnnnnnnnnnnnnnnnnnnnnnnnnnnnnnnnnnnnnnnnnnnnnnnnnnnnnnnnnnnnnnnnnnnnnnnnnnnnnnnnnnnnnnnnnnnnnnnnnnnnnnnnnnnnnnnnnnnnnnnnnnnnnnnnnnnnnnnnnnnnnnnnnnnnnnnnnnnnnnnnnnnnnnnnnnnnnnnnnnnnnnnnnnnnnnnnnnnnnnnnnnnnnnnnnnnnnnnnnnnnnnnnnnnnnnnnnnnnnnnnnnnnnnnnnnnnnnnnnnnnnnnnnnnnnnnnnnnnnnnnnnnnnnnnnnnnnnnnnnnnnnnnnnnnnnnnnnnnnnnnnnnnnnnnnnnnnnnnnnnnnnnnnnnnnnnnnnnnnnnnnnnnnnnnnnnnnnnnnnnnnnnnnnnnnnnnnnnnnnnnnnnnnnnnnnnnnnnnnnnnnnnnnnnnnnnnnnnnnnnnnnnnnnnnnnnnnnnnnnnnnnnnnnnnnnnnnnnnnnnnnnnnnnnnnnnnnnnnnnnnnnnnnnnnnnnnnnnnnnnnnnnnnnnnnnnnnnnnnnnnnnnnnnnnnnnnnnnnnnnnnnnnnnnnnnnnnnnnnnnnnnnnnnnnnnnnnnnnnnnnnnnnnnnnnnnnnnnnnnnnnnnnnnnnnnnnnnnnnnnnnnnnnnnnnnnnnnnnnnnnnnnnnnnnnnnnnnnnnnnnnnnnnnnnnnnnnnnnnnnnnnnnnnnnnnnnnnnnnnnnnnnnnnnnnnnnnnnnnnnnnnnnnnnnnnnnnnnnnnnnnnnnnnnnnnnnnnnnnnnnnnnnnnnnnnnnnnnnnnnnnnnnnnnnnnnnnnnnnnnnnnnnnnnnnnnnnnnnnnnnnnnnnnnnnnnnnnnnnnnnnnnnnnnnnnnnnnnnnnnnnnnnnnnnnnnnnnnnnnnnnnnnnnnnnnnnnnnnnnnnnnnnnnnnnnnnnnnnnnnnnnnnnnnnnnnnnnnnnnnnnnnnnnnnnnnnnnnnnnnnnnnnnnnnnnnnnnnnnnnnnnnnnnnnnnnnnnnnnnnnnnnnnnnnnnnnnnnnnnnnnnnnnnnnnnnnnnnnnnnnnnnnnnnnnnnnnnnnnnnnnnnnnnnnnnnnnnnnnnnnnnnnnnnnnnnnnnnnnnnnnnnnnnnnnnnnnnnnnnnnnnnnnnnnnnnnnnnnnnnnnnnnnnnnnnnnnnnnnnnnnnnnnnnnnnnnnnnnnnnnnnnnnnnnnnnnnnnnnnnnnnnnnnnnnnnnnnnnnnnnnnnnnnnnnnnnnnnnnnnnnnnnnnnnnnnnnnnnnnnnnnnnnnnnnnnnnnnnnnnnnnnnnnnnnnnnnnnnnnnnnnnnnnnnnnnnnnnnnnnnnnnnnnnnnnnnnnnnnnnnnnnnnnnnnnnnnnnnnnnnnnnnnnnnnnnnnnnnnnnnnnnnnnnnnnnnnnnnnnnnnnnnnnnnnnnnnnnnnnnnnnnnnnnnnnnnnnnnnnnnnnnnnnnnnnnnnnnnnnnnnnnnnnnnnnnnnnnnnnnnnnnnnnnnnnnnnnnnnnnnnnnnnnnnnnnnnnnnnnnnnnnnnnnnnnnnnnnnnnnnnnnnnnnnnnnnnnnnnnnnnnnnnnnnnnnnnnnnnnnnnnnnnnnnnnnnnnnnnnnnnnnnnnnnnnnnnnnnnnnnnnnnnnnnnnnnnnnnnnnnnnnnnnnnnnnnnnnnnnnnnnnnnnnnnnnnnnnnnnnnnnnnnnnnnnnnnnnnnnnnnnnnnnnnnnnnnnnnnnnnnnnnnnnnnnnnnnnnnnnnnnnnnnnnnnnnnnnnnnnnnnnnnnnnnnnnnnnnnnnnnnnnnnnnnnnnnnnnnnnnnnnnnnnnnnnnnnnnnnnnnnnnnnnnnnnnnnnnnnnnnnnnnnnnnnnnnnnnnnnnnnnnnnnnnnnnnnnnnnnnnnnnnnnnnnnnnnnnnnnnnnnnnnnnnnnnnnnnnnnnnnnnnnnnnnnnnnnnnnnnnnnnnnnnnnnnnnnnnnnnnnnnnnnnnnnnnnnnnnnnnnnnnnnnnnnnnnnnnnnnnnnnnnnnnnnnnnnnnnnnnnnnnnnnnnnnnnnnnnnnnnnnnnnnnnnnnnnnnnnnnnnnnnnnnnnnnnnnnnnnnnnnnnnnnnnnnnnnnnnnnnnnnnnnnnnnnnnnnnnnnnnnnnnnnnnnnnnnnnnnnnnnnnnnnnnnnnnnnnnnnnnnnnnnnnnnnnnnnnnnnnnnnnnnnnnnnnnnnnnnnnnnnnnnnnnnnnnnnnnnnnnnnnnnnnnnnnnnnnnnnnnnnnnnnnnnnnnnnnnnnnnnnnnnnnnnnnnnnnnnnnnnnnnnnnnnnnnnnnnnnnnnnnnnnnnnnnnnnnnnnnnnnnnnnnnnnnnnnnnnnnnnnnnnnnnnnnnnnnnnnnnnnnnnnnnnnnnnnnnnnnnnnnnnnnnnnnnnnnnnnnnnnnnnnnnnnnnnnnnnnnnnnnnnnnnnnnnnnnnnnnnnnnnnnnnnnnnnnnnnnnnnnnnnnnnnnnnnnnnnnnnnnnnnnnnnnnnnnnnnnnnnnnnnnnnnnnnnnnnnnnnnnnnnnnnnnnnnnnnnnnnnnnnnnnnnnnnnnnnnnnnnnnnnnnnnnnnnnnnnnnnnnnnnnnnnnnnnnnnnnnnnnnnnnnnnnnnnnnnnnnnnnnnnnnnnnnnnnnnnnnnnnnnnnnnnnnnnnnnnnnnnnnnnnnnnnnnnnnnnnnnnnnnnnnnnnnnnnnnnnnnnnnnnnnnnnnnnnnnnnnnnnnnnnnnnnnnnnnnnnnnnnnnnnnnnnnnnnnnnnnnnnnnnnnnnnnnnnnnnnnnnnnnnnnnnnnnnnnnnnnnnnnnnnnnnnnnnnnnnnnnnnnnnnnnnnnnnnnnnnnnnnnnnnnnnnnnnnnnnnnnnnnnnnnnnnnnnnnnnnnnnnnnnnnnnnnnnnnnnnnnnnnnnnnnnnnnnnnnnnnnnnnnnnnnnnnnnnnnnnnnnnnnnnnnnnnnnnnnnnnnnnnnnnnnnnnnnnnnnnnnnnnnnnnnnnnnnnnnnnnnnnnnnnnnnnnnnnnnnnnnnnnnnnnnnnnnnnnnnnnnnnnnnnnnnnnnnnnnnnnnnnnnnnnnnnnnnnnnnnnnnnnnnnnnnnnnnnnnnnnnnnnnnnnnnnnnnnnnnnnnnnnnnnnnnnnnnnnnnnnnnnnnnnnnnnnnnnnnnnnnnnnnnnnnnnnnnnnnnnnnnnnnnnnnnnnnnnnnnnnnnnnnnnnnnnnnnnnnnnnnnnnnnnnnnnnnnnnnnnnnnnnnnnnnnnnnnnnnnnnnnnnnnnnnnnnnnnnnnnnnnnnnnnnnnnnnnnnnnnnnnnnnnnnnnnnnnnnnnnnnnnnnnnnnnnnnnnnnnnnnnnnnnnnnnnnnnnnnnnnnnnnnnnnnnnnnnnnnnnnnnnnnnnnnnnnnnnnnnnnnnnnnnnnnnnnnnnnnnnnnnnnnnnnnnnnnnnnnnnnnnnnnnnnnnnnnnnnnnnnnnnnnnnnnnnnnnnnnnnnnnnnnnnnnnnnnnnnnnnnnnnnnnnnnnnnnnnnnnnnnnnnnnnnnnnnnnnnnnnnnnnnnnnnnnnnnnnnnnnnnnnnnnnnnnnnnnnnnnnnnnnnnnnnnnnnnnnnnnnnnnnnnnnnnnnnnnnnnnnnnnnnnnnnnnnnnnnnnnnnnnnnnnnnnnnnnnnnnnnnnnnnnnnnnnnnnnnnnnnnnnnnnnnnnnnnnnnnnnnnnnnnnnnnnnnnnnnnnnnnnnnnnnnnnnnnnnnnnnnnnnnnnnnnnnnnnnnnnnnnnnnnnnnnnnnnnnnnnnnnnnnnnnnnnnnnnnnnnnnnnnnnnnnnnnnnnnnnnnnnnnnnnnnnnnnnnnnnnnnnnnnnnnnnnnnnnnnnnnnnnnnnnnnnnnnnnnnnnnnnnnnnnnnnnnnnnnnnnnnnnnnnnnnnnnnnnnnnnnnnnnnnnnnnnnnnnnnnnnnnnnnnnnnnnnnnnnnnnnnnnnnnnnnnnnnnnnnnnnnnnnnnnnnnnnnnnnnnnnnnnnnnnnnnnnnnnnnnnnnnnnnnnnnnnnnnnnnnnnnnnnnnnnnnnnnnnnnnnnnnnnnnnnnnnnnnnnnnnnnnnnnnnnnnnnnnnnnnnnnnnnnnnnnnnnnnnnnnnnnnnnnnnnnnnnnnnnnnnnnnnnnnnnnnnnnnnnnnnnnnnnnnnnnnnnnnnnnnnnnnnnnnnnnnnnnnnnnnnnnnnnnnnnnnnnnnnnnnnnnnnnnnnnnnnnnnnnnnnnnnnnnnnnnnnnnnnnnnnnnnnnnnnnnnnnnnnnnnnnnnnnnnnnnnnnnnnnnnnnnnnnnnnnnnnnnnnnnnnnnnnnnnnnnnnnnnnnnnnnnnnnnnnnnnnnnnnnnnnnnnnnnnnnnnnnnnnnnnnnnnnnnnnnnnnnnnnnnnnnnnnnnnnnnnnnnnnnnnnnnnnnnnnnnnnnnnnnnnnnnnnnnnnnnnnnnnnnnnnnnnnnnnnnnnnnnnnnnnnnnnnnnnnnnnnnnnnnnnnnnnnnnnnnnnnnnnnnnnnnnnnnnnnnnnnnnnnnnnnnnnnnnnnnnnnnnnnnnnnnnnnnnnnnnnnnnnnnnnnnnnnnnnnnnnnnnnnnnnnnnnnnnnnnnnnnnnnnnnnnnnnnnnnnnnnnnnnnnnnnnnnnnnnnnnnnnnnnnnnnnnnnnnnnnnnnnnnnnnnnnnnnnnnnnnnnnnnnnnnnnnnnnnnnnnnnnnnnnnnnnnnnnnnnnnnnnnnnnnnnnnnnnnnnnnnnnnnnnnnnnnnnnnnnnnnnnnnnnnnnnnnnnnnnnnnnnnnnnnnnnnnnnnnnnnnnnnnnnnnnnnnnnnnnnnnnnnnnnnnnnnnnnnnnnnnnnnnnnnnnnnnnnnnnnnnnnnnnnnnnnnnnnnnnnnnnnnnnnnnnnnnnnnnnnnnnnnnnnnnnnnnnnnnnnnnnnnnnnnnnnnnnnnnnnnnnnnnnnnnnnnnnnnnnnnnnnnnnnnnnnnnnnnnnnnnnnnnnnnnnnnnnnnnnnnnnnnnnnnnnnnnnnnnnnnnnnnnnnnnnnnnnnnnnnnnnnnnnnnnnnnnnnnnnnnnnnnnnnnnnnnnnnnnnnnnnnnnnnnnnnnnnnnnnnnnnnnnnnnnnnnnnnnnnnnnnnnnnnnnnnnnnnnnnnnnnnnnnnnnnnnnnnnnnnnnnnnnnnnnnnnnnnnnnnnnnnnnnnnnnnnnnnnnnnnnnnnnnnnnnnnnnnnnnnnnnnnnnnnnnnnnnnnnnnnnnnnnnnnnnnnnnnnnnnnnnnnnnnnnnnnnnnnnnnnnnnnnnnnnnnnnnnnnnnnnnnnnnnnnnnnnnnnnnnnnnnnnnnnnnnnnnnnnnnnnnnnnnnnnnnnnnnnnnnnnnnnnnnnnnnnnnnnnnnnnnnnnnnnnnnnnnnnnnnnnnnnnnnnnnnnnnnnnnnnnnnnnnnnnnnnnnnnnnnnnnnnnnnnnnnnnnnnnnnnnnnnnnnnnnnnnnnnnnnnnnnnnnnnnnnnnnnnnnnnnnnnnnnnnnnnnnnnnnnnnnnnnnnnnnnnnnnnnnnnnnnnnnnnnnnnnnnnnnnnnnnnnnnnnnnnnnnnnnnnnnnnnnnnnnnnnnnnnnnnnnnnnnnnnnnnnnnnnnnnnnnnnnnnnnnnnnnnnnnnnnnnnnnnnnnnnnnnnnnnnnnnnnnnnnnnnnnnnnnnnnnnnnnnnnnnnnnnnnnnnnnnnnnnnnnnnnnnnnnnnnnnnnnnnnnnnnnnnnnnnnnnnnnnnnnnnnnnnnnnnnnnnnnnnnnnnnnnnnnnnnnnnnnnnnnnnnnnnnnnnnnnnnnnnnnnnnnnnnnnnnnnnnnnnnnnnnnnnnnnnnnnnnnnnnnnnnnnnnnnnnnnnnnnnnnnnnnnnnnnnnnnnnnnnnnnnnnnnnnnnnnnnnnnnnnnnnnnnnnnnnnnnnnnnnnnnnnnnnnnnnnnnnnnnnnnnnnnnnnnnnnnnnnnnnnnnnnnnnnnnnnnnnnnnnnnnnnnnnnnnnnnnnnnnnnnnnnnnnnnnnnnnnnnnnnnnnnnnnnnnnnnnnnnnnnnnnnnnnnnnnnnnnnnnnnnnnnnnnnnnnnnnnnnnnnnnnnnnnnnnnnnnnnnnnnnnnnnnnnnnnnnnnnnnnnnnnnnnnnnnnnnnnnnnnnnnnnnnnnnnnnnnnnnnnnnnnnnnnnnnnnnnnnnnnnnnnnnnnnnnnnnnnnnnnnnnnnnnnnnnnnnnnnnnnnnnnnnnnnnnnnnnnnnnnnnnnnnnnnnnnnnnnnnnnnnnnnnnnnnnnnnnnnnnnnnnnnnnnnnnnnnnnnnnnnnnnnnnnnnnnnnnnnnnnnnnnnnnnnnnnnnnnnnnnnnnnnnnnnnnnnnnnnnnnnnnnnnnnnnnnnnnnnnnnnnnnnnnnnnnnnnnnnnnnnnnnnnnnnnnnnnnnnnnnnnnnnnnnnnnnnnnnnnnnnnnnnnnnnnnnnnnnnnnnnnnnnnnnnnnnnnnnnnnnnnnnnnnnnnnnnnnnnnnnnnnnnnnnnnnnnnnnnnnnnnnnnnnnnnnnnnnnnnnnnnnnnnnnnnnnnnnnnnnnnnnnnnnnnnnnnnnnnnnnnnnnnnnnnnnnnnnnnnnnnnnnnnnnnnnnnnnnnnnnnnnnnnnnnnnnnnnnnnnnnnnnnnnnnnnnnnnnnnnnnnnnnnnnnnnnnnnnnnnnnnnnnnnnnnnnnnnnnnnnnnnnnnnnnnnnnnnnnnnnnnnnnnnnnnnnnnnnnnnnnnnnnnnnnnnnnnnnnnnnnnnnnnnnnnnnnnnnnnnnnnnnnnnnnnnnnnnnnnnnnnnnnnnnnnnnnnnnnnnnnnnnnnnnnnnnnnnnnnnnnnnnnnnnnnnnnnnnnnnnnnnnnnnnnnnnnnnnnnnnnnnnnnnnnnnnnnnnnnnnnnnnnnnnnnnnnnnnnnnnnnnnnnnnnnnnnnnnnnnnnnnnnnnnnnnnnnnnnnnnnnnnnnnnnnnnnnnnnnnnnnnnnnnnnnnnnnnnnnnnnnnnnnnnnnnnnnnnnnnnnnnnnnnnnnnnnnnnnnnnnnnnnnnnnnnnnnnnnnnnnnnnnnnnnnnnnnnnnnnnnnnnnnnnnnnnnnnnnnnnnnnnnnnnnnnnnnnnnnnnnnnnnnnnnnnnnnnnnnnnnnnnnnnnnnnnnnnnnnnnnnnnnnnnnnnnnnnnnnnnnnnnnnnnnnnnnnnnnnnnnnnnnnnnnnnnnnnnnnnnnnnnnnnnnnnnnnnnnnnnnnnnnnnnnnnnnnnnnnnnnnnnnnnnnnnnnnnnnnnnnnnnnnnnnnnnnnnnnnnnnnnnnnnnnnnnnnnnnnnnnnnnnnnnnnnnnnnnnnnnnnnnnnnnnnnnnnnnnnnnnnnnnnnnnnnnnnnnnnnnnnnnnnnnnnnnnnnnnnnnnnnnnnnnnnnnnnnnnnnnnnnnnnnnnnnnnnnnnnnnnnnnnnnnnnnnnnnnnnnnnnnnnnnnnnnnnnnnnnnnnnnnnnnnnnnnnnnnnnnnnnnnnnnnnnnnnnnnnnnnnnnnnnnnnnnnnnnnnnnnnnnnnnnnnnnnnnnnnnnnnnnnnnnnnnnnnnnnnnnnnnnnnnnnnnnnnnnnnnnnnnnnnnnnnnnnnnnnnnnnnnnnnnnnnnnnnnnnnnnnnnnnnnnnnnnnnnnnnnnnnnnnnnnnnnnnnnnnnnnnnnnnnnnnnnnnnnnnnnnnnnnnnnnnnnnnnnnnnnnnnnnnnnnnnnnnnnnnnnnnnnnnnnnnnnnnnnnnnnnnnnnnnnnnnnnnnnnnnnnnnnnnnnnnnnnnnnnnnnnnnnnnnnnnnnnnnnnnnnnnnnnnnnnnnnnnnnnnnnnnnnnnnnnnnnnnnnnnnnnnnnnnnnnnnnnnnnnnnnnnnnnnnnnnnnnnnnnnnnnnnnnnnnnnnnnnnnnnnnnnnnnnnnnnnnnnnnnnnnnnnnnnnnnnnnnnnnnnnnnnnnnnnnnnnnnnnnnnnnnnnnnnnnnnnnnnnnnnnnnnnnnnnnnnnnnnnnnnnnnnnnnnnnnnnnnnnnnnnnnnnnnnnnnnnnnnnnnnnnnnnnnnnnnnnnnnnnnnnnnnnnnnnnnnnnnnnnnnnnnnnnnnnnnnnnnnnnnnnnnnnnnnnnnnnnnnnnnnnnnnnnnnnnnnnnnnnnnnnnnnnnnnnnnnnnnnnnnnnnnnnnnnnnnnnnnnnnnnnnnnnnnnnnnnnnnnnnnnnnnnnnnnnnnnnnnnnnnnnnnnnnnnnnnnnnnnnnnnnnnnnnnnnnnnnnnnnnnnnnnnnnnnnnnnnnnnnnnnnnnnnnnnnnnnnnnnnnnnnnnnnnnnnnnnnnnnnnnnnnnnnnnnnnnnnnnnnnnnnnnnnnnnnnnnnnnnnnnnnnnnnnnnnnnnnnnnnnnnnnnnnnnnnnnnnnnnnnnnnnnnnnnnnnnnnnnnnnnnnnnnnnnnnnnnnnnnnnnnnnnnnnnnnnnnnnnnnnnnnnnnnnnnnnnnnnnnnnnnnnnnnnnnnnnnnnnnnnnnnnnnnnnnnnnnnnnnnnnnnnnnnnnnnnnnnnnnnnnnnnnnnnnnnnnnnnnnnnnnnnnnnnnnnnnnnnnnnnnnnnnnnnnnnnnnnnnnnnnnnnnnnnnnnnnnnnnnnnnnnnnnnnnnnnnnnnnnnnnnnnnnnnnnnnnnnnnnnnnnnnnnnnnnnnnnnnnnnnnnnnnnnnnnnnnnnnnnnnnnnnnnnnnnnnnnnnnnnnnnnnnnnnnnnnnnnnnnnnnnnnnnnnnnnnnnnnnnnnnnnnnnnnnnnnnnnnnnnnnnnnnnnnnnnnnnnnnnnnnnnnnnnnnnnnnnnnnnnnnnnnnnnnnnnnnnnnnnnnnnnnnnnnnnnnnnnnnnnnnnnnnnnnnnnnnnnnnnnnnnnnnnnnnnnnnnnnnnnnnnnnnnnnnnnnnnnnnnnnnnnnnnnnnnnnnnnnnnnnnnnnnnnnnnnnnnnnnnnnnnnnnnnnnnnnnnnnnnnnnnnnnnnnnnnnnnnnnnnnnnnnnnnnnnnnnnnnnnnnnnnnnnnnnnnnnnnnnnnnnnnnnnnnnnnnnnnnnnnnnnnnnnnnnnnnnnnnnnnnnnnnnnnnnnnnnnnnnnnnnnnnnnnnnnnnnnnnnnnnnnnnnnnnnnnnnnnnnnnnnnnnnnnnnnnnnnnnnnnnnnnnnnnnnnnnnnnnnnnnnnnnnnnnnnnnnnnnnnnnnnnnnnnnnnnnnnnnnnnnnnnnnnnnnnnnnnnnnnnnnnnnnnnnnnnnnnnnnnnnnnnnnnnnnnnnnnnnnnnnnnnnnnnnnnnnnnnnnnnnnnnnnnnnnnnnnnnnnnnnnnnnnnnnnnnnnnnnnnnnnnnnnnnnnnnnnnnnnnnnnnnnnnnnnnnnnnnnnnnnnnnnnnnnnnnnnnnnnnnnnnnnnnnnnnnnnnnnnnnnnnnnnnnnnnnnnnnnnnnnnnnnnnnnnnnnnnnnnnnnnnnnnnnnnnnnnnnnnnnnnnnnnnnnnnnnnnnnnnnnnnnnnnnnnnnnnnnnnnnnnnnnnnnnnnnnnnnnnnnnnnnnnnnnnnnnnnnnnnnnnnnnnnnnnnnnnnnnnnnnnnnnnnnnnnnnnnnnnnnnnnnnnnnnnnnnnnnnnnnnnnnnnnnnnnnnnnnnnnnnnnnnnnnnnnnnnnnnnnnnnnnnnnnnnnnnnnnnnnnnnnnnnnnnnnnnnnnnnnnnnnnnnnnnnnnnnnnnnnnnnnnnnnnnnnnnnnnnnnnnnnnnnnnnnnnnnnnnnnnnnnnnnnnnnnnnnnnnnnnnnnnnnnnnnnnnnnnnnnnnnnnnnnnnnnnnnnnnnnnnnnnnnnnnnnnnnnnnnnnnnnnnnnnnnnnnnnnnnnnnnnnnnnnnnnnnnnnnnnnnnnnnnnnnnnnnnnnnnnnnnnnnnnnnnnnnnnnnnnnnnnnnnnnnnnnnnnnnnnnnnnnnnnnnnnnnnnnnnnnnnnnnnnnnnnnnnnnnnnnnnnnnnnnnnnnnnnnnnnnnnnnnnnnnnnnnnnnnnnnnnnnnnnnnnnnnnnnnnnnnnnnnnnnnnnnnnnnnnnnnnnnnnnnnnnnnnnnnnnnnnnnnnnnnnnnnnnnnnnnnnnnnnnnnnnnnnnnnnnnnnnnnnnnnnnnnnnnnnnnnnnnnnnnnnnnnnnnnnnnnnnnnnnnnnnnnnnnnnnnnnnnnnnnnnnnnnnnnnnnnnnnnnnnnnnnnnnnnnnnnnnnnnnnnnnnnnnnnnnnnnnnnnnnnnnnnnnnnnnnnnnnnnnnnnnnnnnnnnnnnnnnnnnnnnnnnnnnnnnnnnnnnnnnnnnnnnnnnnnnnnnnnnnnnnnnnnnnnnnnnnnnnnnnnnnnnnnnnnnnnnnnnnnnnnnnnnnnnnnnnnnnnnnnnnnnnnnnnnnnnnnnnnnnnnnnnnnnnnnnnnnnnnnnnnnnnnnnnnnnnnnnnnnnnnnnnnnnnnnnnnnnnnnnnnnnnnnnnnnnnnnnnnnnnnnnnnnnnnnnnnnnnnnnnnnnnnnnnnnnnnnnnnnnnnnnnnnnnnnnnnnnnnnnnnnnnnnnnnnnnnnnnnnnnnnnnnnnnnnnnnnnnnnnnnnnnnnnnnnnnnnnnnnnnnnnnnnnnnnnnnnnnnnnnnnnnnnnnnnnnnnnnnnnnnnnnnnnnnnnnnnnnnnnnnnnnnnnnnnnnnnnnnnnnnnnnnnnnnnnnnnnnnnnnnnnnnnnnnnnnnnnnnnnnnnnnnnnnnnnnnnnnnnnnnnnnnnnnnnnnnnnnnnnnnnnnnnnnnnnnnnnnnnnnnnnnnnnnnnnnnnnnnnnnnnnnnnnnnnnnnnnnnnnnnnnnnnnnnnnnnnnnnnnnnnnnnnnnnnnnnnnnnnnnnnnnnnnnnnnnnnnnnnnnnnnnnnnnnnnnnnnnnnnnnnnnnnnnnnnnnnnnnnnnnnnnnnnnnnnnnnnnnnnnnnnnnnnnnnnnnnnnnnnnnnnnnnnnnnnnnnnnnnnnnnnnnnnnnnnnnnnnnnnnnnnnnnnnnnnnnnnnnnnnnnnnnnnnnnnnnnnnnnnnnnnnnnnnnnnnnnnnnnnnnnnnnnnnnnnnnnnnnnnnnnnnnnnnnnnnnnnnnnnnnnnnnnnnnnnnnnnnnnnnnnnnnnnnnnnnnnnnnnnnnnnnnnnnnnnnnnnnnnnnnnnnnnnnnnnnnnnnnnnnnnnnnnnnnnnnnnnnnnnnnnnnnnnnnnnnnnnnnnnnnnnnnnnnnnnnnnnnnnnnnnnnnnnnnnnnnnnnnnnnnnnnnnnnnnnnnnnnnnnnnnnnnnnnnnnnnnnnnnnnnnnnnnnnnnnnnnnnnnnnnnnnnnnnnnnnnnnnnnnnnnnnnnnnnnnnnnnnnnnnnnnnnnnnnnnnnnnnnnnnnnnnnnnnnnnnnnnnnnnnnnnnnnnnnnnnnnnnnnnnnnnnnnnnnnnnnnnnnnnnnnnnnnnnnnnnnnnnnnnnnnnnnnnnnnnnnnnnnnnnnnnnnnnnnnnnnnnnnnnnnnnnnnnnnnnnnnnnnnnnnnnnnnnnnnnnnnnnnnnnnnnnnnnnnnnnnnnnnnnnnnnnnnnnnnnnnnnnnnnnnnnnnnnnnnnnnnnnnnnnnnnnnnnnnnnnnnnnnnnnnnnnnnnnnnnnnnnnnnnnnnnnnnnnnnnnnnnnnnnnnnnnnnnnnnnnnnnnnnnnnnnnnnnnnnnnnnnnnnnnnnnnnnnnnnnnnnnnnnnnnnnnnnnnnnnnnnnnnnnnnnnnnnnnnnnnnnnnnnnnnnnnnnnnnnnnnnnnnnnnnnnnnnnnnnnnnnnnnnnnnnnnnnnnnnnnnnnnnnnnnnnnnnnnnnnnnnnnnnnnnnnnnnnnnnnnnnnnnnnnnnnnnnnnnnnnnnnnnnnnnnnnnnnnnnnnnnnnnnnnnnnnnnnnnnnnnnnnnnnnnnnnnnnnnnnnnnnnnnnnnnnnnnnnnnnnnnnnnnnnnnnnnnnnnnnnnnnnnnnnnnnnnnnnnnnnnnnnnnnnnnnnnnnnnnnnnnnnnnnnnnnnnnnnnnnnnnnnnnnnnnnnnnnnnnnnnnnnnnnnnnnnnnnnnnnnnnnnnnnnnnnnnnnnnnnnnnnnnnnnnnnnnnnnnnnnnnnnnnnnnnnnnnnnnnnnnnnnnnnnnnnnnnnnnnnnnnnnnnnnnnnnnnnnnnnnnnnnnnnnnnnnnnnnnnnnnnnnnnnnnnnnnnnnnnnnnnnnnnnnnnnnnnnnnnnnnnnnnnnnnnnnnnnnnnnnnnnnnnnnnnnnnnnnnnnnnnnnnnnnnnnnnnnnnnnnnnnnnnnnnnnnnnnnnnnnnnnnnnnnnnnnnnnnnnnnnnnnnnnnnnnnnnnnnnnnnnnnnnnnnnnnnnnnnnnnnnnnnnnnnnnnnnnnnnnnnnnnnnnnnnnnnnnnnnnnnnnnnnnnnnnnnnnnnnnnnnnnnnnnnnnnnnnnnnnnnnnnnnnnnnnnnnnnnnnnnnnnnnnnnnnnnnnnnnnnnnnnnnnnnnnnnnnnnnnnnnnnnnnnnnnnnnnnnnnnnnnnnnnnnnnnnnnnnnnnnnnnnnnnnnnnnnnnnnnnnnnnnnnnnnnnnnnnnnnnnnnnnnnnnnnnnnnnnnnnnnnnnnnnnnnnnnnnnnnnnnnnnnnnnnnnnnnnnnnnnnnnnnnnnnnnnnnnnnnnnnnnnnnnnnnnnnnnnnnnnnnnnnnnnnnnnnnnnnnnnnnnnnnnnnnnnnnnnnnnnnnnnnnnnnnnnnnnnnnnnnnnnnnnnnnnnnnnnnnnnnnnnnnnnnnnnnnnnnnnnnnnnnnnnnnnnnnnnnnnnnnnnnnnnnnnnnnnnnnnnnnnnnnnnnnnnnnnnnnnnnnnnnnnnnnnnnnnnnnnnnnnnnnnnnnnnnnnnnnnnnnnnnnnnnnnnnnnnnnnnnnnnnnnnnnnnnnnnnnnnnnnnnnnnnnnnnnnnnnnnnnnnnnnnnnnnnnnnnnnnnnnnnnnnnnnnnnnnnnnnnnnnnnnnnnnnnnnnnnnnnnnnnnnnnnnnnnnnnnnnnnnnnnnnnnnnnnnnnnnnnnnnnnnnnnnnnnnnnnnnnnnnnnnnnnnnnnnnnnnnnnnnnnnnnnnnnnnnnnnnnnnnnnnnnnnnnnnnnnnnnnnnnnnnnnnnnnnnnnnnnnnnnnnnnnnnnnnnnnnnnnnnnnnnnnnnnnnnnnnnnnnnnnnnnnnnnnnnnnnnnnnnnnnnnnnnnnnnnnnnnnnnnnnnnnnnnnnnnnnnnnnnnnnnnnnnnnnnnnnnnnnnnnnnnnnnnnnnnnnnnnnnnnnnnnnnnnnnnnnnnnnnnnnnnnnnnnnnnnnnnnnnnnnnnnnnnnnnnnnnnnnnnnnnnnnnnnnnnnnnnnnnnnnnnnnnnnnnnnnnnnnnnnnnnnnnnnnnnnnnnnnnnnnnnnnnnnnnnnnnnnnnnnnnnnnnnnnnnnnnnnnnnnnnnnnnnnnnnnnnnnnnnnnnnnnnnnnnnnnnnnnnnnnnnnnnnnnnnnnnnnnnnnnnnnnnnnnnnnnnnnnnnnnnnnnnnnnnnnnnnnnnnnnnnnnnnnnnnnnnnnnnnnnnnnnnnnnnnnnnnnnnnnnnnnnnnnnnnnnnnnnnnnnnnnnnnnnnnnnnnnnnnnnnnnnnnnnnnnnnnnnnnnnnnnnnnnnnnnnnnnnnnnnnnnnnnnnnnnnnnnnnnnnnnnnnnnnnnnnnnnnnnnnnnnnnnnnnnnnnnnnnnnnnnnnnnnnnnnnnnnnnnnnnnnnnnnnnnnnnnnnnnnnnnnnnnnnnnnnnnnnnnnnnnnnnnnnnnnnnnnnnnnnnnnnnnnnnnnnnnnnnnnnnnnnnnnnnnnnnnnnnnnnnnnnnnnnnnnnnnnnnnnnnnnnnnnnnnnnnnnnnnnnnnnnnnnnnnnnnnnnnnnnnnnnnnnnnnnnnnnnnnnnnnnnnnnnnnnnnnnnnnnnnnnnnnnnnnnnnnnnnnnnnnnnnnnnnnnnnnnnnnnnnnnnnnnnnnnnnnnnnnnnnnnnnnnnnnnnnnnnnnnnnnnnnnnnnnnnnnnnnnnnnnnnnnnnnnnnnnnnnnnnnnnnnnnnnnnnnnnnnnnnnnnnnnnnnnnnnnnnnnnnnnnnnnnnnnnnnnnnnnnnnnnnnnnnnnnnnnnnnnnnnnnnnnnnnnnnnnnnnnnnnnnnnnnnnnnnnnnnnnnnnnnnnnnnnnnnnnnnnnnnnnnnnnnnnnnnnnnnnnnnnnnnnnnnnnnnnnnnnnnnnnnnnnnnnnnnnnnnnnnnnnnnnnnnnnnnnnnnnnnnnnnnnnnnnnnnnnnnnnnnnnnnnnnnnnnnnnnnnnnnnnnnnnnnnnnnnnnnnnnnnnnnnnnnnnnnnnnnnnnnnnnnnnnnnnnnnnnnnnnnnnnnnnnnnnnnnnnnnnnnnnnnnnnnnnnnnnnnnnnnnnnnnnnnnnnnnnnnnnnnnnnnnnnnnnnnnnnnnnnnnnnnnnnnnnnnnnnnnnnnnnnnnnnnnnnnnnnnnnnnnnnnnnnnnnnnnnnnnnnnnnnnnnnnnnnnnnnnnnnnnnnnnnnnnnnnnnnnnnnnnnnnnnnnnnnnnnnnnnnnnnnnnnnnnnnnnnnnnnnnnnnnnnnnnnnnnnnnnnnnnnnnnnnnnnnnnnnnnnnnnnnnnnnnnnnnnnnnnnnnnnnnnnnnnnnnnnnnnnnnnnnnnnnnnnnnnnnnnnnnnnnnnnnnnnnnnnnnnnnnnnnnnnnnnnnnnnnnnnnnnnnnnnnnnnnnnnnnnnnnnnnnnnnnnnnnnnnnnnnnnnnnnnnnnnnnnnnnnnnnnnnnnnnnnnnnnnnnnnnnnnnnnnnnnnnnnnnnnnnnnnnnnnnnnnnnnnnnnnnnnnnnnnnnnnnnnnnnnnnnnnnnnnnnnnnnnnnnnnnnnnnnnnnnnnnnnnnnnnnnnnnnnnnnnnnnnnnnnnnnnnnnnnnnnnnnnnnnnnnnnnnnnnnnnnnnnnnnnnnnnnnnnnnnnnnnnnnnnnnnnnnnnnnnnnnnnnnnnnnnnnnnnnnnnnnnnnnnnnnnnnnnnnnnnnnnnnnnnnnnnnnnnnnnnnnnnnnnnnnnnnnnnnnnnnnnnnnnnnnnnnnnnnnnnnnnnnnnnnnnnnnnnnnnnnnnnnnnnnnnnnnnnnnnnnnnnnnnnnnnnnnnnnnnnnnnnnnnnnnnnnnnnnnnnnnnnnnnnnnnnnnnnnnnnnnnnnnnnnnnnnnnnnnnnnnnnnnnnnnnnnnnnnnnnnnnnnnnnnnnnnnnnnnnnnnnnnnnnnnnnnnnnnnnnnnnnnnnnnnnnnnnnnnnnnnnnnnnnnnnnnnnnnnnnnnnnnnnnnnnnnnnnnnnnnnnnnnnnnnnnnnnnnnnnnnnnnnnnnnnnnnnnnnnnnnnnnnnnnnnnnnnnnnnnnnnnnnnnnnnnnnnnnnnnnnnnnnnnnnnnnnnnnnnnnnnnnnnnnnnnnnnnnnnnnnnnnnnnnnnnnnnnnnnnnnnnnnnnnnnnnnnnnnnnnnnnnnnnnnnnnnnnnnnnnnnnnnnnnnnnnnnnnnnnnnnnnnnnnnnnnnnnnnnnnnnnnnnnnnnnnnnnnnnnnnnnnnnnnnnnnnnnnnnnnnnnnnnnnnnnnnnnnnnnnnnnnnnnnnnnnnnnnnnnnnnnnnnnnnnnnnnnnnnnnnnnnnnnnnnnnnnnnnnnnnnnnnnnnnnnnnnnnnnnnnnnnnnnnnnnnnnnnnnnnnnnnnnnnnnnnnnnnnnnnnnnnnnnnnnnnnnnnnnnnnnnnnnnnnnnnnnnnnnnnnnnnnnnnnnnnnnnnnnnnnnnnnnnnnnnnnnnnnnnnnnnnnnnnnnnnnnnnnnnnnnnnnnnnnnnnnnnnnnnnnnnnnnnnnnnnnnnnnnnnnnnnnnnnnnnnnnnnnnnnnnnnnnnnnnnnnnnnnnnnnnnnnnnnnnnnnnnnnnnnnnnnnnnnnnnnnnnnnnnnnnnnnnnnnnnnnnnnnnnnnnnnnnnnnnnnnnnnnnnnnnnnnnnnnnnnnnnnnnnnnnnnnnnnnnnnnnnnnnnnnnnnnnnnnnnnnnnnnnnnnnnnnnnnnnnnnnnnnnnnnnnnnnnnnnnnnnnnnnnnnnnnnnnnnnnnnnnnnnnnnnnnnnnnnnnnnnnnnnnnnnnnnnnnnnnnnnnnnnnnnnnnnnnnnnnnnnnnnnnnnnnnnnnnnnnnnnnnnnnnnnnnnnnnnnnnnnnnnnnnnnnnnnnnnnnnnnnnnnnnnnnnnnnnnnnnnnnnnnnnnnnnnnnnnnnnnnnnnnnnnnnnnnnnnnnnnnnnnnnnnnnnnnnnnnnnnnnnnnnnnnnnnnnnnnnnnnnnnnnnnnnnnnnnnnnnnnnnnnnnnnnnnnnnnnnnnnnnnnnnnnnnnnnnnnnnnnnnnnnnnnnnnnnnnnnnnnnnnnnnnnnnnnnnnnnnnnnnnnnnnnnnnnnnnnnnnnnnnnnnnnnnnnnnnnnnnnnnnnnnnnnnnnnnnnnnnnnnnnnnnnnnnnnnnnnnnnnnnnnnnnnnnnnnnnnnnnnnnnnnnnnnnnnnnnnnnnnnnnnnnnnnnnnnnnnnnnnnnnnnnnnnnnnnnnnnnnnnnnnnnnnnnnnnnnnnnnnnnnnnnnnnnnnnnnnnnnnnnnnnnnnnnnnnnnnnnnnnnnnnnnnnnnnnnnnnnnnnnnnnnnnnnnnnnnnnnnnnnnnnnnnnnnnnnnnnnnnnnnnnnnnnnnnnnnnnnnnnnnnnnnnnnnnnnnnnnnnnnnnnnnnnnnnnnnnnnnnnnnnnnnnnnnnnnnnnnnnnnnnnnnnnnnnnnnnnnnnnnnnnnnnnnnnnnnnnnnnnnnnnnnnnnnnnnnnnnnnnnnnnnnnnnnnnnnnnnnnnnnnnnnnnnnnnnnnnnnnnnnnnnnnnnnnnnnnnnnnnnnnnnnnnnnnnnnnnnnnnnnnnnnnnnnnnnnnnnnnnnnnnnnnnnnnnnnnnnnnnnnnnnnnnnnnnnnnnnnnnnnnnnnnnnnnnnnnnnnnnnnnnnnnnnnnnnnnnnnnnnnnnnnnnnnnnnnnnnnnnnnnnnnnnnnnnnnnnnnnnnnnnnnnnnnnnnnnnnnnnnnnnnnnnnnnnnnnnnnnnnnnnnnnnnnnnnnnnnnnnnnnnnnnnnnnnnnnnnnnnnnnnnnnnnnnnnnnnnnnnnnnnnnnnnnnnnnnnnnnnnnnnnnnnnnnnnnnnnnnnnnnnnnnnnnnnnnnnnnnnnnnnnnnnnnnnnnnnnnnnnnnnnnnnnnnnnnnnnnnnnnnnnnnnnnnnnnnnnnnnnnnnnnnnnnnnnnnnnnnnnnnnnnnnnnnnnnnnnnnnnnnnnnnnnnnnnnnnnnnnnnnnnnnnnnnnnnnnnnnnnnnnnnnnnnnnnnnnnnnnnnnnnnnnnnnnnnnnnnnnnnnnnnnnnnnnnnnnnnnnnnnnnnnnnnnnnnnnnnnnnnnnnnnnnnnnnnnnnnnnnnnnnnnnnnnnnnnnnnnnnnnnnnnnnnnnnnnnnnnnnnnnnnnnnnnnnnnnnnnnnnnnnnnnnnnnnnnnnnnnnnnnnnnnnnnnnnnnnnnnnnnnnnnnnnnnnnnnnnnnnnnnnnnnnnnnnnnnnnnnnnnnnnnnnnnnnnnnnnnnnnnnnnnnnnnnnnnnnnnnnnnnnnnnnnnnnnnnnnnnnnnnnnnnnnnnnnnnnnnnnnnnnnnnnnnnnnnnnnnnnnnnnnnnnnnnnnnnnnnnnnnnnnnnnnnnnnnnnnnnnnnnnnnnnnnnnnnnnnnnnnnnnnnnnnnnnnnnnnnnnnnnnnnnnnnnnnnnnnnnnnnnnnnnnnnnnnnnnnnnnnnnnnnnnnnnnnnnnnnnnnnnnnnnnnnnnnnnnnnnnnnnnnnnnnnnnnnnnnnnnnnnnnnnnnnnnnnnnnnnnnnnnnnnnnnnnnnnnnnnnnnnnnnnnnnnnnnnnnnnnnnnnnnnnnnnnnnnnnnnnnnnnnnnnnnnnnnnnnnnnnnnnnnnnnnnnnnnnnnnnnnnnnnnnnnnnnnnnnnnnnnnnnnnnnnnnnnnnnnnnnnnnnnnnnnnnnnnnnnnnnnnnnnnnnnnnnnnnnnnnnnnnnnnnnnnnnnnnnnnnnnnnnnnnnnnnnnnnnnnnnnnnnnnnnnnnnnnnnnnnnnnnnnnnnnnnnnnnnnnnnnnnnnnnnnnnnnnnnnnnnnnnnnnnnnnnnnnnnnnnnnnnnnnnnnnnnnnnnnnnnnnnnnnnnnnnnnnnnnnnnnnnnnnnnnnnnnnnnnnnnnnnnnnnnnnnnnnnnnnnnnnnnnnnnnnnnnnnnnnnnnnnnnnnnnnnnnnnnnnnnnnnnnnnnnnnnnnnnnnnnnnnnnnnnnnnnnnnnnnnnnnnnnnnnnnnnnnnnnnnnnnnnnnnnnnnnnnnnnnnnnnnnnnnnnnnnnnnnnnnnnnnnnnnnnnnnnnnnnnnnnnnnnnnnnnnnnnnnnnnnnnnnnnnnnnnnnnnnnnnnnnnnnnnnnnnnnnnnnnnnnnnnnnnnnnnnnnnnnnnnnnnnnnnnnnnnnnnnnnnnnnnnnnnnnnnnnnnnnnnnnnnnnnnnnnnnnnnnnnnnnnnnnnnnnnnnnnnnnnnnnnnnnnnnnnnnnnnnnnnnnnnnnnnnnnnnnnnnnnnnnnnnnnnnnnnnnnnnnnnnnnnnnnnnnnnnnnnnnnnnnnnnnnnnnnnnnnnnnnnnnnnnnnnnnnnnnnnnnnnnnnnnnnnnnnnnnnnnnnnnnnnnnnnnnnnnnnnnnnnnnnnnnnnnnnnnnnnnnnnnnnnnnnnnnnnnnnnnnnnnnnnnnnnnnnnnnnnnnnnnnnnnnnnnnnnnnnnnnnnnnnnnnnnnnnnnnnnnnnnnnnnnnnnnnnnnnnnnnnnnnnnnnnnnnnnnnnnnnnnnnnnnnnnnnnnnnnnnnnnnnnnnnnnnnnnnnnnnnnnnnnnnnnnnnnnnnnnnnnnnnnnnnnnnnnnnnnnnnnnnnnnnnnnnnnnnnnnnnnnnnnnnnnnnnnnnnnnnnnnnnnnnnnnnnnnnnnnnnnnnnnnnnnnnnnnnnnnnnnnnnnnnnnnnnnnnnnnnnnnnnnnnnnnnnnnnnnnnnnnnnnnnnnnnnnnnnnnnnnnnnnnnnnnnnnnnnnnnnnnnnnnnnnnnnnnnnnnnnnnnnnnnnnnnnnnnnnnnnnnnnnnnnnnnnnnnnnnnnnnnnnnnnnnnnnnnnnnnnnnnnnnnnnnnnnnnnnnnnnnnnnnnnnnnnnnnnnnnnnnnnnnnnnnnnnnnnnnnnnnnnnnnnnnnnnnnnnnnnnnnnnnnnnnnnnnnnnnnnnnnnnnnnnnnnnnnnnnnnnnnnnnnnnnnnnnnnnnnnnnnnnnnnnnnnnnnnnnnnnnnnnnnnnnnnnnnnnnnnnnnnnnnnnnnnnnnnnnnnnnnnnnnnnnnnnnnnnnnnnnnnnnnnnnnnnnnnnnnnnnnnnnnnnnnnnnnnnnnnnnnnnnnnnnnnnnnnnnnnnnnnnnnnnnnnnnnnnnnnnnnnnnnnnnnnnnnnnnnnnnnnnnnnnnnnnnnnnnnnnnnnnnnnnnnnnnnnnnnnnnnnnnnnnnnnnnnnnnnnnnnnnnnnnnnnnnnnnnnnnnnnnnnnnnnnnnnnnnnnnnnnnnnnnnnnnnnnnnnnnnnnnnnnnnnnnnnnnnnnnnnnnnnnnnnnnnnnnnnnnnnnnnnnnnnnnnnnnnnnnnnnnnnnnnnnnnnnnnnnnnnnnnnnnnnnnnnnnnnnnnnnnnnnnnnnnnnnnnnnnnnnnnnnnnnnnnnnnnnnnnnnnnnnnnnnnnnnnnnnnnnnnnnnnnnnnnnnnnnnnnnnnnnnnnnnnnnnnnnnnnnnnnnnnnnnnnnnnnnnnnnnnnnnnnnnnnnnnnnnnnnnnnnnnnnnnnnnnnnnnnnnnnnnnnnnnnnnnnnnnnnnnnnnnnnnnnnnnnnnnnnnnnnnnnnnnnnnnnnnnnnnnnnnnnnnnnnnnnnnnnnnnnnnnnnnnnnnnnnnnnnnnnnnnnnnnnnnnnnnnnnnnnnnnnnnnnnnnnnnnnnnnnnnnnnnnnnnnnnnnnnnnnnnnnnnnnnnnnnnnnnnnnnnnnnnnnnnnnnnnnnnnnnnnnnnnnnnnnnnnnnnnnnnnnnnnnnnnnnnnnnnnnnnnnnnnnnnnnnnnnnnnnnnnnnnnnnnnnnnnnnnnnnnnnnnnnnnnnnnnnnnnnnnnnnnnnnnnnnnnnnnnnnnnnnnnnnnnnnnnnnnnnnnnnnnnnnnnnnnnnnnnnnnnnnnnnnnnnnnnnnnnnnnnnnnnnnnnnnnnnnnnnnnnnnnnnnnnnnnnnnnnnnnnnnnnnnnnnnnnnnnnnnnnnnnnnnnnnnnnnnnnnnnnnnnnnnnnnnnnnnnnnnnnnnnnnnnnnnnnnnnnnnnnnnnnnnnnnnnnnnnnnnnnnnnnnnnnnnnnnnnnnnnnnnnnnnnnnnnnnnnnnnnnnnnnnnnnnnnnnnnnnnnnnnnnnnnnnnnnnnnnnnnnnnnnnnnnnnnnnnnnnnnnnnnnnnnnnnnnnnnnnnnnnnnnnnnnnnnnnnnnnnnnnnnnnnnnnnnnnnnnnnnnnnnnnnnnnnnnnnnnnnnnnnnnnnnnnnnnnnnnnnnnnnnnnnnnnnnnnnnnnnnnnnnnnnnnnnnnnnnnnnnnnnnnnnnnnnnnnnnnnnnnnnnnnnnnnnnnnnnnnnnnnnnnnnnnnnnnnnnnnnnnnnnnnnnnnnnnnnnnnnnnnnnnnnnnnnnnnnnnnnnnnnnnnnnnnnnnnnnnnnnnnnnnnnnnnnnnnnnnnnnnnnnnnnnnnnnnnnnnnnnnnnnnnnnnnnnnnnnnnnnnnnnnnnnnnnnnnnnnnnnnnnnnnnnnnnnnnnnnnnnnnnnnnnnnnnnnnnnnnnnnnnnnnnnnnnnnnnnnnnnnnnnnnnnnnnnnnnnnnnnnnnnnnnnnnnnnnnnnnnnnnnnnnnnnnnnnnnnnnnnnnnnnnnnnnnnnnnnnnnnnnnnnnnnnnnnnnnnnnnnnnnnnnnnnnnnnnnnnnnnnnnnnnnnnnnnnnnnnnnnnnnnnnnnnnnnnnnnnnnnnnnnnnnnnnnnnnnnnnnnnnnnnnnnnnnnnnnnnnnnnnnnnnnnnnnnnnnnnnnnnnnnnnnnnnnnnnnnnnnnnnnnnnnnnnnnnnnnnnnnnnnnnnnnnnnnnnnnnnnnnnnnnnnnnnnnnnnnnnnnnnnnnnnnnnnnnnnnnnnnnnnnnnnnnnnnnnnnnnnnnnnnnnnnnnnnnnnnnnnnnnnnnnnnnnnnnnnnnnnnnnnnnnnnnnnnnnnnnnnnnnnnnnnnnnnnnnnnnnnnnnnnnnnnnnnnnnnnnnnnnnnnnnnnnnnnnnnnnnnnnnnnnnnnnnnnnnnnnnnnnnnnnnnnnnnnnnnnnnnnnnnnnnnnnnnnnnnnnnnnnnnnnnnnnnnnnnnnnnnnnnnnnnnnnnnnnnnnnnnnnnnnnnnnnnnnnnnnnnnnnnnnnnnnnnnnnnnnnnnnnnnnnnnnnnnnnnnnnnnnnnnnnnnnnnnnnnnnnnnnnnnnnnnnnnnnnnnnnnnnnnnnnnnnnnnnnnnnnnnnnnnnnnnnnnnnnnnnnnnnnnnnnnnnnnnnnnnnnnnnnnnnnnnnnnnnnnnnnnnnnnnnnnnnnnnnnnnnnnnnnnnnnnnnnnnnnnnnnnnnnnnnnnnnnnnnnnnnnnnnnnnnnnnnnnnnnnnnnnnnnnnnnnnnnnnnnnnnnnnnnnnnnnnnnnnnnnnnnnnnnnnnnnnnnnnnnnnnnnnnnnnnnnnnnnnnnnnnnnnnnnnnnnnnnnnnnnnnnnnnnnnnnnnnnnnnnnnnnnnnnnnnnnnnnnnnnnnnnnnnnnnnnnnnnnnnnnnnnnnnnnnnnnnnnnnnnnnnnnnnnnnnnnnnnnnnnnnnnnnnnnnnnnnnnnnnnnnnnnnnnnnnnnnnnnnnnnnnnnnnnnnnnnnnnnnnnnnnnnnnnnnnnnnnnnnnnnnnnnnnnnnnnnnnnnnnnnnnnnnnnnnnnnnnnnnnnnnnnnnnnnnnnnnnnnnnnnnnnnnnnnnnnnnnnnnnnnnnnnnnnnnnnnnnnnnnnnnnnnnnnnnnnnnnnnnnnnnnnnnnnnnnnnnnnnnnnnnnnnnnnnnnnnnnnnnnnnnnnnnnnnnnnnnnnnnnnnnnnnnnnnnnnnnnnnnnnnnnnnnnnnnnnnnnnnnnnnnnnnnnnnnnnnnnnnnnnnnnnnnnnnnnnnnnnnnnnnnnnnnnnnnnnnnnnnnnnnnnnnnnnnnnnnnnnnnnnnnnnnnnnnnnnnnnnnnnnnnnnnnnnnnnnnnnnnnnnnnnnnnnnnnnnnnnnnnnnnnnnnnnnnnnnnnnnnnnnnnnnnnnnnnnnnnnnnnnnnnnnnnnnnnnnnnnnnnnnnnnnnnnnnnnnnnnnnnnnnnnnnnnnnnnnnnnnnnnnnnnnnnnnnnnnnnnnnnnnnnnnnnnnnnnnnnnnnnnnnnnnnnnnnnnnnnnnnnnnnnnnnnnnnnnnnnnnnnnnnnnnnnnnnnnnnnnnnnnnnnnnnnnnnnnnnnnnnnnnnnnnnnnnnnnnnnnnnnnnnnnnnnnnnnnnnnnnnnnnnnnnnnnnnnnnnnnnnnnnnnnnnnnnnnnnnnnnnnnnnnnnnnnnnnnnnnnnnnnnnnnnnnnnnnnnnnnnnnnnnnnnnnnnnnnnnnnnnnnnnnnnnnnnnnnnnnnnnnnnnnnnnnnnnnnnnnnnnnnnnnnnnnnnnnnnnnnnnnnnnnnnnnnnnnnnnnnnnnnnnnnnnnnnnnnnnnnnnnnnnnnnnnnnnnnnnnnnnnnnnnnnnnnnnnnnnnnnnnnnnnnnnnnnnnnnnnnnnnnnnnnnnnnnnnnnnnnnnnnnnnnnnnnnnnnnnnnnnnnnnnnnnnnnnnnnnnnnnnnnnnnnnnnnnnnnnnnnnnnnnnnnnnnnnnnnnnnnnnnnnnnnnnnnnnnnnnnnnnnnnnnnnnnnnnnnnnnnnnnnnnnnnnnnnnnnnnnnnnnnnnnnnnnnnnnnnnnnnnnnnnnnnnnnnnnnnnnnnnnnnnnnnnnnnnnnnnnnnnnnnnnnnnnnnnnnnnnnnnnnnnnnnnnnnnnnnnnnnnnnnnnnnnnnnnnnnnnnnnnnnnnnnnnnnnnnnnnnnnnnnnnnnnnnnnnnnnnnnnnnnnnnnnnnnnnnnnnnnnnnnnnnnnnnnnnnnnnnnnnnnnnnnnnnnnnnnnnnnnnnnnnnnnnnnnnnnnnnnnnnnnnnnnnnnnnnnnnnnnnnnnnnnnnnnnnnnnnnnnnnnnnnnnnnnnnnnnnnnnnnnnnnnnnnnnnnnnnnnnnnnnnnnnnnnnnnnnnnnnnnnnnnnnnnnnnnnnnnnnnnnnnnnnnnnnnnnnnnnnnnnnnnnnnnnnnnnnnnnnnnnnnnnnnnnnnnnnnnnnnnnnnnnnnnnnnnnnnnnnnnnnnnnnnnnnnnnnnnnnnnnnnnnnnnnnnnnnnnnnnnnnnnnnnnnnnnnnnnnnnnnnnnnnnnnnnnnnnnnnnnnnnnnnnnnnnnnnnnnnnnnnnnnnnnnnnnnnnnnnnnnnnnnnnnnnnnnnnnnnnnnnnnnnnnnnnnnnnnnnnnnnnnnnnnnnnnnnnnnnnnnnnnnnnnnnnnnnnnnnnnnnnnnnnnnnnnnnnnnnnnnnnnnnnnnnnnnnnnnnnnnnnnnnnnnnnnnnnnnnnnnnnnnnnnnnnnnnnnnnnnnnnnnnnnnnnnnnnnnnnnnnnnnnnnnnnnnnnnnnnnnnnnnnnnnnnnnnnnnnnnnnnnnnnnnnnnnnnnnnnnnnnnnnnnnnnnnnnnnnnnnnnnnnnnnnnnnnnnnnnnnnnnnnnnnnnnnnnnnnnnnnnnnnnnnnnnnnnnnnnnnnnnnnnnnnnnnnnnnnnnnnnnnnnnnnnnnnnnnnnnnnnnnnnnnnnnnnnnnnnnnnnnnnnnnnnnnnnnnnnnnnnnnnnnnnnnnnnnnnnnnnnnnnnnnnnnnnnnnnnnnnnnnnnnnnnnnnnnnnnnnnnnnnnnnnnnnnnnnnnnnnnnnnnnnnnnnnnnnnnnnnnnnnnnnnnnnnnnnnnnnnnnnnnnnnnnnnnnnnnnnnnnnnnnnnnnnnnnnnnnnnnnnnnnnnnnnnnnnnnnnnnnnnnnnnnnnnnnnnnnnnnnnnnnnnnnnnnnnnnnnnnnnnnnnnnnnnnnnnnnnnnnnnnnnnnnnnnnnnnnnnnnnnnnnnnnnnnnnnnnnnnnnnnnnnnnnnnnnnnnnnnnnnnnnnnnnnnnnnnnnnnnnnnnnnnnnnnnnnnnnnnnnnnnnnnnnnnnnnnnnnnnnnnnnnnnnnnnnnnnnnnnnnnnnnnnnnnnnnnnnnnnnnnnnnnnnnnnnnnnnnnnnnnnnnnnnnnnnnnnnnnnnnnnnnnnnnnnnnnnnnnnnnnnnnnnnnnnnnnnnnnnnnnnnnnnnnnnnnnnnnnnnnnnnnnnnnnnnnnnnnnnnnnnnnnnnnnnnnnnnnnnnnnnnnnnnnnnnnnnnnnnnnnnnnnnnnnnnnnnnnnnnnnnnnnnnnnnnnnnnnnnnnnnnnnnnnnnnnnnnnnnnnnnnnnnnnnnnnnnnnnnnnnnnnnnnnnnnnnnnnnnnnnnnnnnnnnnnnnnnnnnnnnnnnnnnnnnnnnnnnnnnnnnnnnnnnnnnnnnnnnnnnnnnnnnnnnnnnnnnnnnnnnnnnnnnnnnnnnnnnnnnnnnnnnnnnnnnnnnnnnnnnnnnnnnnnnnnnnnnnnnnnnnnnnnnnnnnnnnnnnnnnnnnnnnnnnnnnnnnnnnnnnnnnnnnnnnnnnnnnnnnnnnnnnnnnnnnnnnnnnnnnnnnnnnnnnnnnnnnnnnnnnnnnnnnnnnnnnnnnnnnnnnnnnnnnnnnnnnnnnnnnnnnnnnnnnnnnnnnnnnnnnnnnnnnnnnnnnnnnnnnnnnnnnnnnnnnnnnnnnnnnnnnnnnnnnnnnnnnnnnnnnnnnnnnnnnnnnnnnnnnnnnnnnnnnnnnnnnnnnnnnnnnnnnnnnnnnnnnnnnnnnnnnnnnnnnnnnnnnnnnnnnnnnnnnnnnnnnnnnnnnnnnnnnnnnnnnnnnnnnnnnnnnnnnnnnnnnnnnnnnnnnnnnnnnnnnnnnnnnnnnnnnnnnnnnnnnnnnnnnnnnnnnnnnnnnnnnnnnnnnnnnnnnnnnnnnnnnnnnnnnnnnnnnnnnnnnnnnnnnnnnnnnnnnnnnnnnnnnnnnnnnnnnnnnnnnnnnnnnnnnnnnnnnnnnnnnnnnnnnnnnnnnnnnnnnnnnnnnnnnnnnnnnnnnnnnnnnnnnnnnnnnnnnnnnnnnnnnnnnnnnnnnnnnnnnnnnnnnnnnnnnnnnnnnnnnnnnnnnnnnnnnnnnnnnnnnnnnnnnnnnnnnnnnnnnnnnnnnnnnnnnnnnnnnnnnnnnnnnnnnnnnnnnnnnnnnnnnnnnnnnnnnnnnnnnnnnnnnnnnnnnnnnnnnnnnnnnnnnnnnnnnnnnnnnnnnnnnnnnnnnnnnnnnnnnnnnnnnnnnnnnnnnnnnnnnnnnnnnnnnnnnnnnnnnnnnnnnnnnnnnnnnnnnnnnnnnnnnnnnnnnnnnnnnnnnnnnnnnnnnnnnnnnnnnnnnnnnnnnnnnnnnnnnnnnnnnnnnnnnnnnnnnnnnnnnnnnnnnnnnnnnnnnnnnnnnnnnnnnnnnnnnnnnnnnnnnnnnnnnnnnnnnnnnnnnnnnnnnnnnnnnnnnnnnnnnnnnnnnnnnnnnnnnnnnnnnnnnnnnnnnnnnnnnnnnnnnnnnnnnnnnnnnnnnnnnnnnnnnnnnnnnnnnnnnnnnnnnnnnnnnnnnnnnnnnnnnnnnnnnnnnnnnnnnnnnnnnnnnnnnnnnnnnnnnnnnnnnnnnnnnnnnnnnnnnnnnnnnnnnnnnnnnnnnnnnnnnnnnnnnnnnnnnnnnnnnnnnnnnnnnnnnnnnnnnnnnnnnnnnnnnnnnnnnnnnnnnnnnnnnnnnnnnnnnnnnnnnnnnnnnnnnnnnnnnnnnnnnnnnnnnnnnnnnnnnnnnnnnnnnnnnnnnnnnnnnnnnnnnnnnnnnnnnnnnnnnnnnnnnnnnnnnnnnnnnnnnnnnnnnnnnnnnnnnnnnnnnnnnnnnnnnnnnnnnnnnnnnnnnnnnnnnnnnnnnnnnnnnnnnnnnnnnnnnnnnnnnnnnnnnnnnnnnnnnnnnnnnnnnnnnnnnnnnnnnnnnnnnnnnnnnnnnnnnnnnnnnnnnnnnnnnnnnnnnnnnnnnnnnnnnnnnnnnnnnnnnnnnnnnnnnnnnnnnnnnnnnnnnnnnnnnnnnnnnnnnnnnnnnnnnnnnnnnnnnnnnnnnnnnnnnnnnnnnnnnnnnnnnnnnnnnnnnnnnnnnnnnnnnnnnnnnnnnnnnnnnnnnnnnnnnnnnnnnnnnnnnnnnnnnnnnnnnnnnnnnnnnnnnnnnnnnnnnnnnnnnnnnnnnnnnnnnnnnnnnnnnnnnnnnnnnnnnnnnnnnnnnnnnnnnnnnnnnnnnnnnnnnnnnnnnnnnnnnnnnnnnnnnnnnnnnnnnnnnnnnnnnnnnnnnnnnnnnnnnnnnnnnnnnnnnnnnnnnnnnnnnnnnnnnnnnnnnnnnnnnnnnnnnnnnnnnnnnnnnnnnnnnnnnnnnnnnnnnnnnnnnnnnnnnnnnnnnnnnnnnnnnnnnnnnnnnnnnnnnnnnnnnnnnnnnnnnnnnnnnnnnnnnnnnnnnnnnnnnnnnnnnnnnnnnnnnnnnnnnnnnnnnnnnnnnnnnnnnnnnnnnnnnnnnnnnnnnnnnnnnnnnnnnnnnnnnnnnnnnnnnnnnnnnnnnnnnnnnnnnnnnnnnnnnnnnnnnnnnnnnnnnnnnnnnnnnnnnnnnnnnnnnnnnnnnnnnnnnnnnnnnnnnnnnnnnnnnnnnnnnnnnnnnnnnnnnnnnnnnnnnnnnnnnnnnnnnnnnnnnnnnnnnnnnnnnnnnnnnnnnnnnnnnnnnnnnnnnnnnnnnnnnnnnnnnnnnnnnnnnnnnnnnnnnnnnnnnnnnnnnnnnnnnnnnnnnnnnnnnnnnnnnnnnnnnnnnnnnnnnnnnnnnnnnnnnnnnnnnnnnnnnnnnnnnnnnnnnnnnnnnnnnnnnnnnnnnnnnnnnnnnnnnnnnnnnnnnnnnnnnnnnnnnnnnnnnnnnnnnnnnnnnnnnnnnnnnnnnnnnnnnnnnnnnnnnnnnnnnnnnnnnnnnnnnnnnnnnnnnnnnnnnnnnnnnnnnnnnnnnnnnnnnnnnnnnnnnnnnnnnnnnnnnnnnnnnnnnnnnnnnnnnnnnnnnnnnnnnnnnnnnnnnnnnnnnnnnnnnnnnnnnnnnnnnnnnnnnnnnnnnnnnnnnnnnnnnnnnnnnnnnnnnnnnnnnnnnnnnnnnnnnnnnnnnnnnnnnnnnnnnnnnnnnnnnnnnnnnnnnnnnnnnnnnnnnnnnnnnnnnnnnnnnnnnnnnnnnnnnnnnnnnnnnnnnnnnnnnnnnnnnnnnnnnnnnnnnnnnnnnnnnnnnnnnnnnnnnnnnnnnnnnnnnnnnnnnnnnnnnnnnnnnnnnnnnnnnnnnnnnnnnnnnnnnnnnnnnnnnnnnnnnnnnnnnnnnnnnnnnnnnnnnnnnnnnnnnnnnnnnnnnnnnnnnnnnnnnnnnnnnnnnnnnnnnnnnnnnnnnnnnnnnnnnnnnnnnggtgcggggagagagggagaagtcagcctcgcgagaatagctccaaagcttcacgcccagcgctatggataccaccacggtcgagacgaagtccaacttgccggtcatggtgacggtgatgaatgccgtcgccagggtcagcagcagggaaacctcgaagtaacgctgcacactaatgttggcctgaaggctgaggagcgtggagggttcggcttgtgcggtttttgccatgagcggcgcttttatcgagactacattttaacgcaagacacatttccagggagtgtccgaaacctgtgttgctcgggctggcggaggtcggggagacctacgatacgccaatcggcaatgagatatcttttgcccaaacctggagtcacagggatagtctcaaatcgcgtgggagaatcttaaggcagcattggttttacattttgcgtggtacaacctcttccgtgtgcattcgaccccaggggctcacgccctcgatggaaggggggatcatggatcccgtatggaacatgcaggacctgatttcatggggattagtcgacacatgtcatacctagtggtgcacccgggtatgtggtgtcgggtgtgtcaagaactatattcccttttgtttcagtgggttgtctgcggtaaccaacccaagtggttgggatgcaatataatgaaatacggaaattatagacaccgggcttctacgggagaccgggcgagtatcatcaaaggggcatcgacggttatgctgtcggtgcctcttgtgcttttggggccaatttcctttgaggaggttgggaaatggcaagatgtgccgtgctaatcgatggcgcttacttggacaaagtcctccagaacgatttcgcgaacgctcgtgtggatatcggaaagctggcagatgagctggcaggagccatggaacgcttaagaacctactactaccactgcatgccattccaaagtgttcctccaacccctgaagagcgcctcaaatttgcggcgatggatggattcatatttaacctcaaaaagcttcccaggttccagtttagacaaggcaagctgcaaaggattggagctgaattcaaacaaaagagggtggatatatggatggccgttgatctggttagaatgagctcgaataggcaaatcgagaaagcaatccttgtaaccggtgacagcgacctggttccagctatcgaagcagctagggatgaaggggttgtcgtcatccttttttactctccaaactctcgccatgatgaacttctacaagcatgcgacgagaggtacgagatcaccagaaatctcattgagaaaacaaaactgataaccgctaccgtcagatcgtcggcagcgctcccctcggccaccgccaagaaaccgtaatcatttagcaattagcaatataggaaattcgttgcgctatcttgcgagccagttgcgaaatggcggcctgccccaggctggaaataggaaaccaacgcagtccgcttttgcggggagggttcgaaatctcccctgggtaagcatggacgcgaatggagcggtaagtaatgccgtgctggagctcgacaacggagtcggcgagcgtgagggaggcgatcccgaaaccagcgagcttatcgcgcaagctcaggagcgcctctgcacgggagcggccgaaggcggaggggaaattccacaagtcatctaacaggccgtcgtcgaggccgcgcaccatggccactcgagggccgcgccggaagatggcggcagcaaggtaaggagattctcccgcgcgccggggacgcggcggagggtagagttggggctggccggatttgtatccccggcaccagcttcgcagcgggcacgcagcgcatcggggagcgcgtggcaggcagagggtttgccctaactccatcaatgcctggttgaactggctggggcttcgcggcgcaagcaggcgttggagctgggcttcgaccgcgcgacggaagctgcgctggtgaagatgaccccggagcgctcccaaacgcgcgaggactcgagccacatttccgtccagcagggtgtagggcagaccgaaggcaatgcttagaacggcccgcgcggtgtaatccccgattccgggcagcgaacgaatctgcttgtagtcacgggggaccgccccggcaaagctgtgaaccagttcctgggcggcctggtggaggtgacgggcgcggcggtagtagccaagccccgaccacagtttgagcacccgctcgagcggggcgcgcgcaaggtcggtgatcgtgggaaaggcctcgagaaaacgttggtagtacgggatcaccgtcgccacctgggtctgctgaagcattacctcggagacccagatagcatagggatcacgactctttcgccaggggagggaacgcgcgtttcgatcataccacgccagcagcgcctttcgaatggcatcttcgtcctggctcgaaagcttcatccgcttcatactatcgcttttcttggtgctgggtcagtttggatttgtagcggcgagtttatctcgccacatggcggcataaaaccgcctccacatttcgattagcgatcacagccacatggcggcgtgaagccacctctacatcttgatttgtattcccaggcagcctaaaatttctcccctcaagcatgctatgcttgcgccgcaaatgccttgctggcgattgaagtgacgttgcgtccttaacgcttgagaggtttttcagtttcctgtctgcaatctcagagccgagagtcattaaggttatgcgaacaattgtgaaactggttcttggcgcgcttttatgggtgccgctggccttttgcggtcaagccggccgcgacttattagcttcggcagaggcgattccagccagcccggcgaacaatactctctggatcatccctcacacccactgggaaggcgccgtcttcaaaacacgcgaggaatacctggagattggcctaccttacatcctgacggcgctcgagctgttgaagacccacccggagtatcgttttgtactcgaccaagtcgcttacgtgaaaccattcctggagaggtgtcccgagcaggcggcggtcttccgaaaactggtttcagagggaaaattggagatcgtaggcgcgaatgacgtcatgttggacgtgaatattcccagtggcgagtcgtggattcgacaagccctctacggaaagacttactatcgcgaaaagttaggagtggacgtaaaggtgggctgggcgctcgacaccttcgggcaccacgcccagatgccacaactcctgaagctcgcaggatacaagtcatactggttccagcgcggggtgcgcggtaatgacactccctccgaatttctctgggaaggaatagatggcacccggattcctgctttctggctgcccttaggctacggcatgttctaccccacgcccgacagcttgttcaaattcgatctgtatgcgcgtcaacaatgggaggcgctggggaattattctcgatggccggagcgtgtagcggtggccggggccgatgtaatcgagcccgaagaggcgctgcccatcatggtgcgcgaatgcaatcgagaagggaaacagccctttgccttgcgttttggagttccgagcgatttcgaggccgtggttgccaaacggccggaccggcccgtggtgagcggcgaactcaacccggtctttcagggcgtgtatagcgcccgaattgaactcaagcaatggatgagagaccttgaacgcgtccttggtacagccgaaaaattgagcgccctggcctcctggctggggtttccagcggataacgctaacctggctcgcgcctgggagccggtgctgttcaacgaagctcacgatttggcttccggcaccatggtagacaaggtttacgaagacacaatgcgcggataccaattctccaaaagcctcggtgaagaaacggtggagacgagcctcaacgcgatcgcctccaaaattgacacgcgcatggacggtattcccgttgtcgtcttcaaccccctcgggtggccccgcagcgacatcgcagaagttgacatcggcttttcggatgcaggctatcgggcggttgaactcctcggggcttccggtgaagccgttccggtgcagtacaccgaaacaacacgttatggcgacgggggcatcaagcacgcgaggattacatttattgctcgcgacgtgccgggaattggttattctctgtatcaagtaattccaaagcaggttggcacttcgggcggcggaaaccgcacagcctccagcgcaccgccaagctcgaccatgcacgaagactttgggtctctcgaaaacgagtattaccaagccgcctttgacctttggactggtgcaatgaccaaactacatgtgaagtccggcgattgggaggcgctgggtgaccggcccgccaatgttgtggcgcgtgagcaggatgggggagacttttgggaattatacggcaccctcaatggcggcagactcactgccatgactcgcaagcaaggcttgccgccacccgagaggacgcacttcagcaacgattgggtgggcggcgacgggaggactgaagaggggccggtatattctgagttccacatttcgcatccattcggcgacggcagctttcaaacaaccgtcaggctctacccgggaattcgccgcatcgatatcaggaccgacatcctgaataacgagaaatttgtgcgttacagggtcctgttccccacctccatcaaaagcgggcagaggttcgacgaaatccctttcggcgccatcgaacggcccctggcgcaggagtttccagcgcaaaattggatggattacggcgacgggaccaagggcgtcgccatgctcaatcgggggctccccgggaacaacgttgcggagggcacgctgatgctatctctgctgcgctcggcgcgcatatccgcgtaccccttctttggcggttatgagccaggcgtttcttcagacttagggcttgagttaggggtgaagcgaacctttgattacgcgctcctcccccacgaaggagactggcgtagcgcggaaatttaccgggccggctgggagtttaaccatccgttaacagttcgcaaagtgggttcacacccaggtctattgccgaaacgatgggggttgctcgaggtgtccgaacccgacgtcgtcgtatcagcgctgaagccgagccgaaacggtagcgtggtcttgagggtttacgaggccgcaggccgcccgagcagcggtattaaaatcaagctaaacgccggcatctcctcagcccgtgaggtgaacctccttgaggacgacggcgcagacctcgaggttgtgaaaggcacgctgcaatttgacctgggcccgtatcagatcaaaaccttccggctgaagttgctgccacttgaggcgggcaagtaggatggcatgaggggttgctcgatgaagatgaatgtcacgtaggtgtaccttatagtacgaacctttgagtgcttgccagggtcgagacacgcccacgatgctgagcaagcagggaggagcgccgaatggaccgccgatcgtttctgcaaatcagcaccgcagccgcctcgagtttgtccgcccacccaagcctggcgaggacactcaccgattcatctccttctaaggttcgaatgaagctaggctcgcaatttggcgccggcccttcggatgaaacgctgcgcgatctggctgcactaggagttaatcacatttgcagcggactcccctcggcgcgtttggatgagcactggagtgtgcaagggctcaccaagcttaaggaaagggttgagtctttcggcattcagttgctgatggtcccgttgcctctgagttccagtccaattgatcgcgcggagttcccgtctatcatgttggggaagtcccccgagcgcgaccgcgcgatcgaggaaatctgccaaatgattcgcaacgtggcgcgggcaggcattcccgctgtgaagtacaacctcacgcttctgggtgtgccgcgcacttccccgacccgggggcgcggcggagccctttacagcaccttcaattacgagattgccaaacaaaccgagacactgactcaggctggcccggtcagtgcggatatgatgtgggagagaatcacctactttctggaacgcgcggtgccggtcgcagaggaatgccaagtcaaaatggcttgccatccccacgatcccggaatgcctcgggaggcgggctttcgaggcatccaccgcgttctgggcagcgtcgaagggttgaagcgcttcgtcgaaattcatcccagtccttatcacggcctcaatttttgccaggggactgtgagtgaaatgttggagcgtcctggagaagagatcttcgacgtcatccgttactttggcgagagacggaaaatctttaacgtacacttccgcaatatccatgggcacttcctgaactttcaggaaaccttcccggataatggcgacgtcaacatggtgcaggcaatgcgggtttataaggaagtgaactacgacggcatgatcatgccggaccatgcgccccaaatggagggggacacgggcactaagcaagccttcgctttcgagtatggctacatccaggctctcctccaggcggtagaaaacgaagcgtgaggttgcggccaacagaagatcgattgccgccctcgcggcgggtttcccatctttcccacttttaccacttttcccatttttcttgaggtagtctgtctccgcagcaaattatcccactgtttttcaacgggttggagggcttcaaaaacatatagctttttccctatatgtgtatcattttgcaacactctgtgctctgtggttttatgtgtagcctttataagtagcctctgactcacaccgcttgctctggctcccagccgcttccacgggctgcaaaaaaactctagcaagccctcatcctgggtcccgacttagcggggcgaaggatctctgcagttatcctctgttcgagcttcagaacattggccgccagccttgtcggtggtgcgcatgtgtgcgcagtccctcgttgatccgcgccacccacgaaaaattcgtctgctccaggagtgcgggtgtatagtgacaacttcgaaggcggcctgacggttgcggttgtttaataggcccagtgtcgtccatgtatgcggataagcatttagccggtccggtttgcgaagggaatgggagggggaactgtgaactataacctgctcgaagagaaatggattcccgctctgtggaaagatgggcatagcgaacgcctgggcattattgacgcgctcactcaagcagcgaggattcaccaaattgccgccagcaaccctatggaccgcgtggccatcctgcgtttcctgcttgcgctgctttattggtgcaggggaaatcccccggacaacagggacttgatctcttcgttttcctcggattggttcaagaagctcgatgaacacaggggttgcttcaatcttctgggtgatggcgagagattctatcaggaccaagctgcaaagcgccgccgccccgtgacggtattggtgcaggaagtacccgcaggcaacaacttttggcaccttaggcactcaacggataatcgaagcggcctatgcccagcatgctgcgctttggggctactgcggttgccccttttttcggtgagtggtctcagcggccctggggagccgaatcttatggctggcattaatggagttccacctgtatacgtcgtgccgtgggataaatcgctgctgaaaaccctcattgctaactggactgcgcacccaaatataggaacaccctcatgggttgactacggaggggtaccaaacaccgacgcggacgttcccctcctaactggtctaacacttctgccaaggcgagtatatctgcacgagccaattaagacgcgggatgcatgcactgggtgcggtctaaccgacttgccactcatatatgcctgcgaataccagactgctggcaaacaggaaaacaacaggtggagtgatccccacgcggtctatttagacggggaaacacggaaggccatgagggctgtggaccttacggcgtcggcccgattccgaatggaccgcccgtggtccgacttggttgctcgccttctcgaatgtggtaaatccggcactctccttattgtaggcttcgcgacgcaccaggcaaagaacatagatgtgtgggagcggagcattgacgtccgaacaagccccgcggcctcgggaaaagcgctagcacttgtgaagaattggcgggtgcaaggatgggccatggagaaaaagttggagaggctagggagatcagaatcagaaggggccgcccttattgccgccattcgtccccacgtcgaagcaaaggtttcagagagggcggcagagctgatttccggcggcgaggaggcctgggaacaggcgtcccaggaatacgccccgatgatgtcggcaattgccaaatcgctttcgccgggggttaccaccgctgctctccgccggcggcgccagattgaatacgcaaagccggatatgcggcctaaacagcccgcaaccggcaagaagaaggggaagaaagggggaacaagtgacagcgacggagcaatacatccaagtcctgacccgtttgaaatctggtgaactcgggctcttgcgccagcatgccgggcgggggcttgatgaaacggtggagggttttgacctgtttgccgggctttggtggcctttgcgcgcgcaaaaccagcgcgcgcctcgccgcgctgtggcgtggctggtcgccaaactttacgcggtgcggcgcgttgaacattcacccggcgaaaccatcgcttatcaacttgggcgttgtcgtaaagatagggaccccgaaaaagatccggtcacgcaaaggttcgacagattgttggcgttaccgattgaaaatcttgagccctccctgcaatgggccattaaccttgtgtcttcccaacacctcaagctcgactgggtaagactcaccaacgacatttccatctgggaacgcgaaaccacccggctcaaatgggccgaggagttcttacgctggacgacataaagatgcgcgttcggctgtagcggcggtctccgaccgccgtcgtcgatcggagatcgacgctactcgaaataaacccttccaaggaggaccgtcatgctgattgaaattcacgccatccagaaccacagcccggccaatctgaaccgggacgacttgggcgcgcccaagacctgctttttcggaggggtcctgcgctctcgcatttccagccagtgcctgaagcgcagcatccgcatgagccaagggttcaaagagttgctggggggcatccgcacacgcaaattggcggaaaagatttcggaaaaagtaaccgggaaacccgccgcgaaaaagcgggcagcgaagattcttgaaaagtgcggcatcaagccccgcggcgaagacgataccagaagtgacatgcttgtatacacaactcaggaagcaattgtccagatggccaaacttctgcaggatggcgacggaagaaacgatgaggaattggcggaagagtttggcaagctgatcagtgaatccacctgcgtgcccgacatggccctcagcggcaggatgctggaaaccggagtactgaaagatacaacggttgaagccgccctgcaggttgcccacgcgatttccacgcacgaggctcgtccggaggttgattacttcgtggcggccgatgacgtccccggcgatgatgcgggtgcgggcctggtgggtgaagccatgtttggggccgcctgcttctacaagtacttctccatcgatttggaaaccctgaagcggaacctcaagggcaaccaggaacttgccgcccacacggtgggttcatttattcgcggcgccgccctgtcaaatcccaccggcaagcagaacagcttcgccgcccacaatcctcccgacggaatcctggtggaaatcaggaacaatccgctcagctacgccaacgcctttgcccgcccggcggcccatggccagcgagacatcgtatcccagagcatcgcgcagctcggccagtacgtccacgatgttgacaccggatacggcaagcccaccgcgcgcttctggttctcgcccaatcttcgctatccgttgaatgtcgcggaagaaggccaggacatcgctctggctgcgaccaacctcaagtcgctcgatggtttgattgaggctgtcattaaaggtattggctacgattggggggaggttcagaaggcggttgtagactcggaggtggcctgatgagcgcaaacgccctctttcttcgccttgaaggtccccttcaggcatggggcgaccagcagtcgaagtttttgattcggcggacggctgacgcccccaccaagtccggcgtcatcggtttgctttgcgcggccttgggcgtttcgcgtcccgaggccgcagaaggctggttatccaagctcggcgcgctgcgtatgggagtccgcatcgatgtgccgggagtccggtggtgggactatcacaccgtgggcgcgggcatgccgatgcgcactgccgaaggtggaaccaagtccggggccatgctcacccgacgcgagtatctctcggatgcatcctttctcgtcgcacttcagggtgagccgggcctgatcgccgaacttgaggccgccatcaaagccccgaagtggacagtgtaccttggcagaaaatgctgtcctccttcgcaccctttgatggagcatccgcccggtgaattcgccgacccgctctccgccctcagttccgtttcctggcgcaagcggctgacgggcgacccccaacccgaaaccgtggactgcctgcttgactggtatccaaccgcagagcagccggaggcgcctgccgatgcgcttgtctggtacgacgtcccggtaacattcgacccgccctcacaccagccccgattcgttattcggaagcaactacgagtgggacccggaggagaggtgacgcttgccatctccacagcccagaccctgacgcctgcacctactcggccaaccgccgactatgccaacacggagtaccgaaagcggaggggggaccggctggctggtgactatcatttgtgcgtcttttgcaagtcacccgccaccactgtccagcacatcacttaccggcgcgcaggcgggaatgaaagcgacgatgacctgcgctcgctgtgccgtctctgtcacgacgctgtgaccatgatcgaatacgggatgggcatggggctggaccggattaatccggaagaaccacgctggcgcgatctgatcagcgaaaagcgagaggagattattaaattccgttcgctcgaaacccggcgccgacatctcgttgccgaggaggtggaatagccatgtttctttcctgtctcctgattgacaccggcatcaatcctgaccgcccccgtcccgggcgcatgtggttgcgcaatctttatcacgttcaccagcgtctttgcatggcattcccttccgcctcccgaaaatcccatgacgcggatttcctcaagcctttcgacccggcggatttcggcaacggtcaggtgcacggagcgcgccgggcggactccggttttctctttcggatcgacccgggccctgccgggaggtctgtgatcctggtgcaatcggcggtgaaccccgactgggattatgcatttcaaaatgccgggtttttgctggccgctcccgccgaagtaaaggtgtacgagccgggttttgcggcgggacagaagcttcgattccggttggcggcaaatcccacgaggagactatcgcagcattctcgtgagcgggacggaaagccggtgggggagaagtggatcgggaagcgcgtgcccgtgcccgctgacagtctgtttgaatggctcgctcgccgggccgagtcggcggggttctccgtcaacaaggattccaccacgcttcagccgggttacatctatgtgaataagacgcgggatggcggggggcagcgcctgcgctcagt

SEQ ID NO: 1021 - DNA, 108001 bp, Artificial Sequence
  Synthetic Oligonucleotide
  misc_feature (1)..(95931): n is a, c, g, or t
nnnnnnnnnnnnnnnnnnnnnnnnnnnnnnnnnnnnnnnnnnnnnnnnnnnnnnnnnnnnnnnnnnnnnnnnnnnnnnnnnnnnnnnnnnnnnnnnnnnnnnnnnnnnnnnnnnnnnnnnnnnnnnnnnnnnnnnnnnnnnnnnnnnnnnnnnnnnnnnnnnnnnnnnnnnnnnnnnnnnnnnnnnnnnnnnnnnnnnnnnnnnnnnnnnnnnnnnnnnnnnnnnnnnnnnnnnnnnnnnnnnnnnnnnnnnnnnnnnnnnnnnnnnnnnnnnnnnnnnnnnnnnnnnnnnnnnnnnnnnnnnnnnnnnnnnnnnnnnnnnnnnnnnnnnnnnnnnnnnnnnnnnnnnnnnnnnnnnnnnnnnnnnnnnnnnnnnnnnnnnnnnnnnnnnnnnnnnnnnnnnnnnnnnnnnnnnnnnnnnnnnnnnnnnnnnnnnnnnnnnnnnnnnnnnnnnnnnnnnnnnnnnnnnnnnnnnnnnnnnnnnnnnnnnnnnnnnnnnnnnnnnnnnnnnnnnnnnnnnnnnnnnnnnnnnnnnnnnnnnnnnnnnnnnnnnnnnnnnnnnnnnnnnnnnnnnnnnnnnnnnnnnnnnnnnnnnnnnnnnnnnnnnnnnnnnnnnnnnnnnnnnnnnnnnnnnnnnnnnnnnnnnnnnnnnnnnnnnnnnnnnnnnnnnnnnnnnnnnnnnnnnnnnnnnnnnnnnnnnnnnnnnnnnnnnnnnnnnnnnnnnnnnnnnnnnnnnnnnnnnnnnnnnnnnnnnnnnnnnnnnnnnnnnnnnnnnnnnnnnnnnnnnnnnnnnnnnnnnnnnnnnnnnnnnnnnnnnnnnnnnnnnnnnnnnnnnnnnnnnnnnnnnnnnnnnnnnnnnnnnnnnnnnnnnnnnnnnnnnnnnnnnnnnnnnnnnnnnnnnnnnnnnnnnnnnnnnnnnnnnnnnnnnnnnnnnnnnnnnnnnnnnnnnnnnnnnnnnnnnnnnnnnnnnnnnnnnnnnnnnnnnnnnnnnnnnnnnnnnnnnnnnnnnnnnnnnnnnnnnnnnnnnnnnnnnnnnnnnnnnnnnnnnnnnnnnnnnnnnnnnnnnnnnnnnnnnnnnnnnnnnnnnnnnnnnnnnnnnnnnnnnnnnnnnnnnnnnnnnnnnnnnnnnnnnnnnnnnnnnnnnnnnnnnnnnnnnnnnnnnnnnnnnnnnnnnnnnnnnnnnnnnnnnnnnnnnnnnnnnnnnnnnnnnnnnnnnnnnnnnnnnnnnnnnnnnnnnnnnnnnnnnnnnnnnnnnnnnnnnnnnnnnnnnnnnnnnnnnnnnnnnnnnnnnnnnnnnnnnnnnnnnnnnnnnnnnnnnnnnnnnnnnnnnnnnnnnnnnnnnnnnnnnnnnnnnnnnnnnnnnnnnnnnnnnnnnnnnnnnnnnnnnnnnnnnnnnnnnnnnnnnnnnnnnnnnnnnnnnnnnnnnnnnnnnnnnnnnnnnnnnnnnnnnnnnnnnnnnnnnnnnnnnnnnnnnnnnnnnnnnnnnnnnnnnnnnnnnnnnnnnnnnnnnnnnnnnnnnnnnnnnnnnnnnnnnnnnnnnnnnnnnnnnnnnnnnnnnnnnnnnnnnnnnnnnnnnnnnnnnnnnnnnnnnnnnnnnnnnnnnnnnnnnnnnnnnnnnnnnnnnnnnnnnnnnnnnnnnnnnnnnnnnnnnnnnnnnnnnnnnnnnnnnnnnnnnnnnnnnnnnnnnnnnnnnnnnnnnnnnnnnnnnnnnnnnnnnnnnnnnnnnnnnnnnnnnnnnnnnnnnnnnnnnnnnnnnnnnnnnnnnnnnnnnnnnnnnnnnnnnnnnnnnnnnnnnnnnnnnnnnnnnnnnnnnnnnnnnnnnnnnnnnnnnnnnnnnnnnnnnnnnnnnnnnnnnnnnnnnnnnnnnnnnnnnnnnnnnnnnnnnnnnnnnnnnnnnnnnnnnnnnnnnnnnnnnnnnnnnnnnnnnnnnnnnnnnnnnnnnnnnnnnnnnnnnnnnnnnnnnnnnnnnnnnnnnnnnnnnnnnnnnnnnnnnnnnnnnnnnnnnnnnnnnnnnnnnnnnnnnnnnnnnnnnnnnnnnnnnnnnnnnnnnnnnnnnnnnnnnnnnnnnnnnnnnnnnnnnnnnnnnnnnnnnnnnnnnnnnnnnnnnnnnnnnnnnnnnnnnnnnnnnnnnnnnnnnnnnnnnnnnnnnnnnnnnnnnnnnnnnnnnnnnnnnnnnnnnnnnnnnnnnnnnnnnnnnnnnnnnnnnnnnnnnnnnnnnnnnnnnnnnnnnnnnnnnnnnnnnnnnnnnnnnnnnnnnnnnnnnnnnnnnnnnnnnnnnnnnnnnnnnnnnnnnnnnnnnnnnnnnnnnnnnnnnnnnnnnnnnnnnnnnnnnnnnnnnnnnnnnnnnnnnnnnnnnnnnnnnnnnnnnnnnnnnnnnnnnnnnnnnnnnnnnnnnnnnnnnnnnnnnnnnnnnnnnnnnnnnnnnnnnnnnnnnnnnnnnnnnnnnnnnnnnnnnnnnnnnnnnnnnnnnnnnnnnnnnnnnnnnnnnnnnnnnnnnnnnnnnnnnnnnnnnnnnnnnnnnnnnnnnnnnnnnnnnnnnnnnnnnnnnnnnnnnnnnnnnnnnnnnnnnnnnnnnnnnnnnnnnnnnnnnnnnnnnnnnnnnnnnnnnnnnnnnnnnnnnnnnnnnnnnnnnnnnnnnnnnnnnnnnnnnnnnnnnnnnnnnnnnnnnnnnnnnnnnnnnnnnnnnnnnnnnnnnnnnnnnnnnnnnnnnnnnnnnnnnnnnnnnnnnnnnnnnnnnnnnnnnnnnnnnnnnnnnnnnnnnnnnnnnnnnnnnnnnnnnnnnnnnnnnnnnnnnnnnnnnnnnnnnnnnnnnnnnnnnnnnnnnnnnnnnnnnnnnnnnnnnnnnnnnnnnnnnnnnnnnnnnnnnnnnnnnnnnnnnnnnnnnnnnnnnnnnnnnnnnnnnnnnnnnnnnnnnnnnnnnnnnnnnnnnnnnnnnnnnnnnnnnnnnnnnnnnnnnnnnnnnnnnnnnnnnnnnnnnnnnnnnnnnnnnnnnnnnnnnnnnnnnnnnnnnnnnnnnnnnnnnnnnnnnnnnnnnnnnnnnnnnnnnnnnnnnnnnnnnnnnnnnnnnnnnnnnnnnnnnnnnnnnnnnnnnnnnnnnnnnnnnnnnnnnnnnnnnnnnnnnnnnnnnnnnnnnnnnnnnnnnnnnnnnnnnnnnnnnnnnnnnnnnnnnnnnnnnnnnnnnnnnnnnnnnnnnnnnnnnnnnnnnnnnnnnnnnnnnnnnnnnnnnnnnnnnnnnnnnnnnnnnnnnnnnnnnnnnnnnnnnnnnnnnnnnnnnnnnnnnnnnnnnnnnnnnnnnnnnnnnnnnnnnnnnnnnnnnnnnnnnnnnnnnnnnnnnnnnnnnnnnnnnnnnnnnnnnnnnnnnnnnnnnnnnnnnnnnnnnnnnnnnnnnnnnnnnnnnnnnnnnnnnnnnnnnnnnnnnnnnnnnnnnnnnnnnnnnnnnnnnnnnnnnnnnnnnnnnnnnnnnnnnnnnnnnnnnnnnnnnnnnnnnnnnnnnnnnnnnnnnnnnnnnnnnnnnnnnnnnnnnnnnnnnnnnnnnnnnnnnnnnnnnnnnnnnnnnnnnnnnnnnnnnnnnnnnnnnnnnnnnnnnnnnnnnnnnnnnnnnnnnnnnnnnnnnnnnnnnnnnnnnnnnnnnnnnnnnnnnnnnnnnnnnnnnnnnnnnnnnnnnnnnnnnnnnnnnnnnnnnnnnnnnnnnnnnnnnnnnnnnnnnnnnnnnnnnnnnnnnnnnnnnnnnnnnnnnnnnnnnnnnnnnnnnnnnnnnnnnnnnnnnnnnnnnnnnnnnnnnnnnnnnnnnnnnnnnnnnnnnnnnnnnnnnnnnnnnnnnnnnnnnnnnnnnnnnnnnnnnnnnnnnnnnnnnnnnnnnnnnnnnnnnnnnnnnnnnnnnnnnnnnnnnnnnnnnnnnnnnnnnnnnnnnnnnnnnnnnnnnnnnnnnnnnnnnnnnnnnnnnnnnnnnnnnnnnnnnnnnnnnnnnnnnnnnnnnnnnnnnnnnnnnnnnnnnnnnnnnnnnnnnnnnnnnnnnnnnnnnnnnnnnnnnnnnnnnnnnnnnnnnnnnnnnnnnnnnnnnnnnnnnnnnnnnnnnnnnnnnnnnnnnnnnnnnnnnnnnnnnnnnnnnnnnnnnnnnnnnnnnnnnnnnnnnnnnnnnnnnnnnnnnnnnnnnnnnnnnnnnnnnnnnnnnnnnnnnnnnnnnnnnnnnnnnnnnnnnnnnnnnnnnnnnnnnnnnnnnnnnnnnnnnnnnnnnnnnnnnnnnnnnnnnnnnnnnnnnnnnnnnnnnnnnnnnnnnnnnnnnnnnnnnnnnnnnnnnnnnnnnnnnnnnnnnnnnnnnnnnnnnnnnnnnnnnnnnnnnnnnnnnnnnnnnnnnnnnnnnnnnnnnnnnnnnnnnnnnnnnnnnnnnnnnnnnnnnnnnnnnnnnnnnnnnnnnnnnnnnnnnnnnnnnnnnnnnnnnnnnnnnnnnnnnnnnnnnnnnnnnnnnnnnnnnnnnnnnnnnnnnnnnnnnnnnnnnnnnnnnnnnnnnnnnnnnnnnnnnnnnnnnnnnnnnnnnnnnnnnnnnnnnnnnnnnnnnnnnnnnnnnnnnnnnnnnnnnnnnnnnnnnnnnnnnnnnnnnnnnnnnnnnnnnnnnnnnnnnnnnnnnnnnnnnnnnnnnnnnnnnnnnnnnnnnnnnnnnnnnnnnnnnnnnnnnnnnnnnnnnnnnnnnnnnnnnnnnnnnnnnnnnnnnnnnnnnnnnnnnnnnnnnnnnnnnnnnnnnnnnnnnnnnnnnnnnnnnnnnnnnnnnnnnnnnnnnnnnnnnnnnnnnnnnnnnnnnnnnnnnnnnnnnnnnnnnnnnnnnnnnnnnnnnnnnnnnnnnnnnnnnnnnnnnnnnnnnnnnnnnnnnnnnnnnnnnnnnnnnnnnnnnnnnnnnnnnnnnnnnnnnnnnnnnnnnnnnnnnnnnnnnnnnnnnnnnnnnnnnnnnnnnnnnnnnnnnnnnnnnnnnnnnnnnnnnnnnnnnnnnnnnnnnnnnnnnnnnnnnnnnnnnnnnnnnnnnnnnnnnnnnnnnnnnnnnnnnnnnnnnnnnnnnnnnnnnnnnnnnnnnnnnnnnnnnnnnnnnnnnnnnnnnnnnnnnnnnnnnnnnnnnnnnnnnnnnnnnnnnnnnnnnnnnnnnnnnnnnnnnnnnnnnnnnnnnnnnnnnnnnnnnnnnnnnnnnnnnnnnnnnnnnnnnnnnnnnnnnnnnnnnnnnnnnnnnnnnnnnnnnnnnnnnnnnnnnnnnnnnnnnnnnnnnnnnnnnnnnnnnnnnnnnnnnnnnnnnnnnnnnnnnnnnnnnnnnnnnnnnnnnnnnnnnnnnnnnnnnnnnnnnnnnnnnnnnnnnnnnnnnnnnnnnnnnnnnnnnnnnnnnnnnnnnnnnnnnnnnnnnnnnnnnnnnnnnnnnnnnnnnnnnnnnnnnnnnnnnnnnnnnnnnnnnnnnnnnnnnnnnnnnnnnnnnnnnnnnnnnnnnnnnnnnnnnnnnnnnnnnnnnnnnnnnnnnnnnnnnnnnnnnnnnnnnnnnnnnnnnnnnnnnnnnnnnnnnnnnnnnnnnnnnnnnnnnnnnnnnnnnnnnnnnnnnnnnnnnnnnnnnnnnnnnnnnnnnnnnnnnnnnnnnnnnnnnnnnnnnnnnnnnnnnnnnnnnnnnnnnnnnnnnnnnnnnnnnnnnnnnnnnnnnnnnnnnnnnnnnnnnnnnnnnnnnnnnnnnnnnnnnnnnnnnnnnnnnnnnnnnnnnnnnnnnnnnnnnnnnnnnnnnnnnnnnnnnnnnnnnnnnnnnnnnnnnnnnnnnnnnnnnnnnnnnnnnnnnnnnnnnnnnnnnnnnnnnnnnnnnnnnnnnnnnnnnnnnnnnnnnnnnnnnnnnnnnnnnnnnnnnnnnnnnnnnnnnnnnnnnnnnnnnnnnnnnnnnnnnnnnnnnnnnnnnnnnnnnnnnnnnnnnnnnnnnnnnnnnnnnnnnnnnnnnnnnnnnnnnnnnnnnnnnnnnnnnnnnnnnnnnnnnnnnnnnnnnnnnnnnnnnnnnnnnnnnnnnnnnnnnnnnnnnnnnnnnnnnnnnnnnnnnnnnnnnnnnnnnnnnnnnnnnnnnnnnnnnnnnnnnnnnnnnnnnnnnnnnnnnnnnnnnnnnnnnnnnnnnnnnnnnnnnnnnnnnnnnnnnnnnnnnnnnnnnnnnnnnnnnnnnnnnnnnnnnnnnnnnnnnnnnnnnnnnnnnnnnnnnnnnnnnnnnnnnnnnnnnnnnnnnnnnnnnnnnnnnnnnnnnnnnnnnnnnnnnnnnnnnnnnnnnnnnnnnnnnnnnnnnnnnnnnnnnnnnnnnnnnnnnnnnnnnnnnnnnnnnnnnnnnnnnnnnnnnnnnnnnnnnnnnnnnnnnnnnnnnnnnnnnnnnnnnnnnnnnnnnnnnnnnnnnnnnnnnnnnnnnnnnnnnnnnnnnnnnnnnnnnnnnnnnnnnnnnnnnnnnnnnnnnnnnnnnnnnnnnnnnnnnnnnnnnnnnnnnnnnnnnnnnnnnnnnnnnnnnnnnnnnnnnnnnnnnnnnnnnnnnnnnnnnnnnnnnnnnnnnnnnnnnnnnnnnnnnnnnnnnnnnnnnnnnnnnnnnnnnnnnnnnnnnnnnnnnnnnnnnnnnnnnnnnnnnnnnnnnnnnnnnnnnnnnnnnnnnnnnnnnnnnnnnnnnnnnnnnnnnnnnnnnnnnnnnnnnnnnnnnnnnnnnnnnnnnnnnnnnnnnnnnnnnnnnnnnnnnnnnnnnnnnnnnnnnnnnnnnnnnnnnnnnnnnnnnnnnnnnnnnnnnnnnnnnnnnnnnnnnnnnnnnnnnnnnnnnnnnnnnnnnnnnnnnnnnnnnnnnnnnnnnnnnnnnnnnnnnnnnnnnnnnnnnnnnnnnnnnnnnnnnnnnnnnnnnnnnnnnnnnnnnnnnnnnnnnnnnnnnnnnnnnnnnnnnnnnnnnnnnnnnnnnnnnnnnnnnnnnnnnnnnnnnnnnnnnnnnnnnnnnnnnnnnnnnnnnnnnnnnnnnnnnnnnnnnnnnnnnnnnnnnnnnnnnnnnnnnnnnnnnnnnnnnnnnnnnnnnnnnnnnnnnnnnnnnnnnnnnnnnnnnnnnnnnnnnnnnnnnnnnnnnnnnnnnnnnnnnnnnnnnnnnnnnnnnnnnnnnnnnnnnnnnnnnnnnnnnnnnnnnnnnnnnnnnnnnnnnnnnnnnnnnnnnnnnnnnnnnnnnnnnnnnnnnnnnnnnnnnnnnnnnnnnnnnnnnnnnnnnnnnnnnnnnnnnnnnnnnnnnnnnnnnnnnnnnnnnnnnnnnnnnnnnnnnnnnnnnnnnnnnnnnnnnnnnnnnnnnnnnnnnnnnnnnnnnnnnnnnnnnnnnnnnnnnnnnnnnnnnnnnnnnnnnnnnnnnnnnnnnnnnnnnnnnnnnnnnnnnnnnnnnnnnnnnnnnnnnnnnnnnnnnnnnnnnnnnnnnnnnnnnnnnnnnnnnnnnnnnnnnnnnnnnnnnnnnnnnnnnnnnnnnnnnnnnnnnnnnnnnnnnnnnnnnnnnnnnnnnnnnnnnnnnnnnnnnnnnnnnnnnnnnnnnnnnnnnnnnnnnnnnnnnnnnnnnnnnnnnnnnnnnnnnnnnnnnnnnnnnnnnnnnnnnnnnnnnnnnnnnnnnnnnnnnnnnnnnnnnnnnnnnnnnnnnnnnnnnnnnnnnnnnnnnnnnnnnnnnnnnnnnnnnnnnnnnnnnnnnnnnnnnnnnnnnnnnnnnnnnnnnnnnnnnnnnnnnnnnnnnnnnnnnnnnnnnnnnnnnnnnnnnnnnnnnnnnnnnnnnnnnnnnnnnnnnnnnnnnnnnnnnnnnnnnnnnnnnnnnnnnnnnnnnnnnnnnnnnnnnnnnnnnnnnnnnnnnnnnnnnnnnnnnnnnnnnnnnnnnnnnnnnnnnnnnnnnnnnnnnnnnnnnnnnnnnnnnnnnnnnnnnnnnnnnnnnnnnnnnnnnnnnnnnnnnnnnnnnnnnnnnnnnnnnnnnnnnnnnnnnnnnnnnnnnnnnnnnnnnnnnnnnnnnnnnnnnnnnnnnnnnnnnnnnnnnnnnnnnnnnnnnnnnnnnnnnnnnnnnnnnnnnnnnnnnnnnnnnnnnnnnnnnnnnnnnnnnnnnnnnnnnnnnnnnnnnnnnnnnnnnnnnnnnnnnnnnnnnnnnnnnnnnnnnnnnnnnnnnnnnnnnnnnnnnnnnnnnnnnnnnnnnnnnnnnnnnnnnnnnnnnnnnnnnnnnnnnnnnnnnnnnnnnnnnnnnnnnnnnnnnnnnnnnnnnnnnnnnnnnnnnnnnnnnnnnnnnnnnnnnnnnnnnnnnnnnnnnnnnnnnnnnnnnnnnnnnnnnnnnnnnnnnnnnnnnnnnnnnnnnnnnnnnnnnnnnnnnnnnnnnnnnnnnnnnnnnnnnnnnnnnnnnnnnnnnnnnnnnnnnnnnnnnnnnnnnnnnnnnnnnnnnnnnnnnnnnnnnnnnnnnnnnnnnnnnnnnnnnnnnnnnnnnnnnnnnnnnnnnnnnnnnnnnnnnnnnnnnnnnnnnnnnnnnnnnnnnnnnnnnnnnnnnnnnnnnnnnnnnnnnnnnnnnnnnnnnnnnnnnnnnnnnnnnnnnnnnnnnnnnnnnnnnnnnnnnnnnnnnnnnnnnnnnnnnnnnnnnnnnnnnnnnnnnnnnnnnnnnnnnnnnnnnnnnnnnnnnnnnnnnnnnnnnnnnnnnnnnnnnnnnnnnnnnnnnnnnnnnnnnnnnnnnnnnnnnnnnnnnnnnnnnnnnnnnnnnnnnnnnnnnnnnnnnnnnnnnnnnnnnnnnnnnnnnnnnnnnnnnnnnnnnnnnnnnnnnnnnnnnnnnnnnnnnnnnnnnnnnnnnnnnnnnnnnnnnnnnnnnnnnnnnnnnnnnnnnnnnnnnnnnnnnnnnnnnnnnnnnnnnnnnnnnnnnnnnnnnnnnnnnnnnnnnnnnnnnnnnnnnnnnnnnnnnnnnnnnnnnnnnnnnnnnnnnnnnnnnnnnnnnnnnnnnnnnnnnnnnnnnnnnnnnnnnnnnnnnnnnnnnnnnnnnnnnnnnnnnnnnnnnnnnnnnnnnnnnnnnnnnnnnnnnnnnnnnnnnnnnnnnnnnnnnnnnnnnnnnnnnnnnnnnnnnnnnnnnnnnnnnnnnnnnnnnnnnnnnnnnnnnnnnnnnnnnnnnnnnnnnnnnnnnnnnnnnnnnnnnnnnnnnnnnnnnnnnnnnnnnnnnnnnnnnnnnnnnnnnnnnnnnnnnnnnnnnnnnnnnnnnnnnnnnnnnnnnnnnnnnnnnnnnnnnnnnnnnnnnnnnnnnnnnnnnnnnnnnnnnnnnnnnnnnnnnnnnnnnnnnnnnnnnnnnnnnnnnnnnnnnnnnnnnnnnnnnnnnnnnnnnnnnnnnnnnnnnnnnnnnnnnnnnnnnnnnnnnnnnnnnnnnnnnnnnnnnnnnnnnnnnnnnnnnnnnnnnnnnnnnnnnnnnnnnnnnnnnnnnnnnnnnnnnnnnnnnnnnnnnnnnnnnnnnnnnnnnnnnnnnnnnnnnnnnnnnnnnnnnnnnnnnnnnnnnnnnnnnnnnnnnnnnnnnnnnnnnnnnnnnnnnnnnnnnnnnnnnnnnnnnnnnnnnnnnnnnnnnnnnnnnnnnnnnnnnnnnnnnnnnnnnnnnnnnnnnnnnnnnnnnnnnnnnnnnnnnnnnnnnnnnnnnnnnnnnnnnnnnnnnnnnnnnnnnnnnnnnnnnnnnnnnnnnnnnnnnnnnnnnnnnnnnnnnnnnnnnnnnnnnnnnnnnnnnnnnnnnnnnnnnnnnnnnnnnnnnnnnnnnnnnnnnnnnnnnnnnnnnnnnnnnnnnnnnnnnnnnnnnnnnnnnnnnnnnnnnnnnnnnnnnnnnnnnnnnnnnnnnnnnnnnnnnnnnnnnnnnnnnnnnnnnnnnnnnnnnnnnnnnnnnnnnnnnnnnnnnnnnnnnnnnnnnnnnnnnnnnnnnnnnnnnnnnnnnnnnnnnnnnnnnnnnnnnnnnnnnnnnnnnnnnnnnnnnnnnnnnnnnnnnnnnnnnnnnnnnnnnnnnnnnnnnnnnnnnnnnnnnnnnnnnnnnnnnnnnnnnnnnnnnnnnnnnnnnnnnnnnnnnnnnnnnnnnnnnnnnnnnnnnnnnnnnnnnnnnnnnnnnnnnnnnnnnnnnnnnnnnnnnnnnnnnnnnnnnnnnnnnnnnnnnnnnnnnnnnnnnnnnnnnnnnnnnnnnnnnnnnnnnnnnnnnnnnnnnnnnnnnnnnnnnnnnnnnnnnnnnnnnnnnnnnnnnnnnnnnnnnnnnnnnnnnnnnnnnnnnnnnnnnnnnnnnnnnnnnnnnnnnnnnnnnnnnnnnnnnnnnnnnnnnnnnnnnnnnnnnnnnnnnnnnnnnnnnnnnnnnnnnnnnnnnnnnnnnnnnnnnnnnnnnnnnnnnnnnnnnnnnnnnnnnnnnnnnnnnnnnnnnnnnnnnnnnnnnnnnnnnnnnnnnnnnnnnnnnnnnnnnnnnnnnnnnnnnnnnnnnnnnnnnnnnnnnnnnnnnnnnnnnnnnnnnnnnnnnnnnnnnnnnnnnnnnnnnnnnnnnnnnnnnnnnnnnnnnnnnnnnnnnnnnnnnnnnnnnnnnnnnnnnnnnnnnnnnnnnnnnnnnnnnnnnnnnnnnnnnnnnnnnnnnnnnnnnnnnnnnnnnnnnnnnnnnnnnnnnnnnnnnnnnnnnnnnnnnnnnnnnnnnnnnnnnnnnnnnnnnnnnnnnnnnnnnnnnnnnnnnnnnnnnnnnnnnnnnnnnnnnnnnnnnnnnnnnnnnnnnnnnnnnnnnnnnnnnnnnnnnnnnnnnnnnnnnnnnnnnnnnnnnnnnnnnnnnnnnnnnnnnnnnnnnnnnnnnnnnnnnnnnnnnnnnnnnnnnnnnnnnnnnnnnnnnnnnnnnnnnnnnnnnnnnnnnnnnnnnnnnnnnnnnnnnnnnnnnnnnnnnnnnnnnnnnnnnnnnnnnnnnnnnnnnnnnnnnnnnnnnnnnnnnnnnnnnnnnnnnnnnnnnnnnnnnnnnnnnnnnnnnnnnnnnnnnnnnnnnnnnnnnnnnnnnnnnnnnnnnnnnnnnnnnnnnnnnnnnnnnnnnnnnnnnnnnnnnnnnnnnnnnnnnnnnnnnnnnnnnnnnnnnnnnnnnnnnnnnnnnnnnnnnnnnnnnnnnnnnnnnnnnnnnnnnnnnnnnnnnnnnnnnnnnnnnnnnnnnnnnnnnnnnnnnnnnnnnnnnnnnnnnnnnnnnnnnnnnnnnnnnnnnnnnnnnnnnnnnnnnnnnnnnnnnnnnnnnnnnnnnnnnnnnnnnnnnnnnnnnnnnnnnnnnnnnnnnnnnnnnnnnnnnnnnnnnnnnnnnnnnnnnnnnnnnnnnnnnnnnnnnnnnnnnnnnnnnnnnnnnnnnnnnnnnnnnnnnnnnnnnnnnnnnnnnnnnnnnnnnnnnnnnnnnnnnnnnnnnnnnnnnnnnnnnnnnnnnnnnnnnnnnnnnnnnnnnnnnnnnnnnnnnnnnnnnnnnnnnnnnnnnnnnnnnnnnnnnnnnnnnnnnnnnnnnnnnnnnnnnnnnnnnnnnnnnnnnnnnnnnnnnnnnnnnnnnnnnnnnnnnnnnnnnnnnnnnnnnnnnnnnnnnnnnnnnnnnnnnnnnnnnnnnnnnnnnnnnnnnnnnnnnnnnnnnnnnnnnnnnnnnnnnnnnnnnnnnnnnnnnnnnnnnnnnnnnnnnnnnnnnnnnnnnnnnnnnnnnnnnnnnnnnnnnnnnnnnnnnnnnnnnnnnnnnnnnnnnnnnnnnnnnnnnnnnnnnnnnnnnnnnnnnnnnnnnnnnnnnnnnnnnnnnnnnnnnnnnnnnnnnnnnnnnnnnnnnnnnnnnnnnnnnnnnnnnnnnnnnnnnnnnnnnnnnnnnnnnnnnnnnnnnnnnnnnnnnnnnnnnnnnnnnnnnnnnnnnnnnnnnnnnnnnnnnnnnnnnnnnnnnnnnnnnnnnnnnnnnnnnnnnnnnnnnnnnnnnnnnnnnnnnnnnnnnnnnnnnnnnnnnnnnnnnnnnnnnnnnnnnnnnnnnnnnnnnnnnnnnnnnnnnnnnnnnnnnnnnnnnnnnnnnnnnnnnnnnnnnnnnnnnnnnnnnnnnnnnnnnnnnnnnnnnnnnnnnnnnnnnnnnnnnnnnnnnnnnnnnnnnnnnnnnnnnnnnnnnnnnnnnnnnnnnnnnnnnnnnnnnnnnnnnnnnnnnnnnnnnnnnnnnnnnnnnnnnnnnnnnnnnnnnnnnnnnnnnnnnnnnnnnnnnnnnnnnnnnnnnnnnnnnnnnnnnnnnnnnnnnnnnnnnnnnnnnnnnnnnnnnnnnnnnnnnnnnnnnnnnnnnnnnnnnnnnnnnnnnnnnnnnnnnnnnnnnnnnnnnnnnnnnnnnnnnnnnnnnnnnnnnnnnnnnnnnnnnnnnnnnnnnnnnnnnnnnnnnnnnnnnnnnnnnnnnnnnnnnnnnnnnnnnnnnnnnnnnnnnnnnnnnnnnnnnnnnnnnnnnnnnnnnnnnnnnnnnnnnnnnnnnnnnnnnnnnnnnnnnnnnnnnnnnnnnnnnnnnnnnnnnnnnnnnnnnnnnnnnnnnnnnnnnnnnnnnnnnnnnnnnnnnnnnnnnnnnnnnnnnnnnnnnnnnnnnnnnnnnnnnnnnnnnnnnnnnnnnnnnnnnnnnnnnnnnnnnnnnnnnnnnnnnnnnnnnnnnnnnnnnnnnnnnnnnnnnnnnnnnnnnnnnnnnnnnnnnnnnnnnnnnnnnnnnnnnnnnnnnnnnnnnnnnnnnnnnnnnnnnnnnnnnnnnnnnnnnnnnnnnnnnnnnnnnnnnnnnnnnnnnnnnnnnnnnnnnnnnnnnnnnnnnnnnnnnnnnnnnnnnnnnnnnnnnnnnnnnnnnnnnnnnnnnnnnnnnnnnnnnnnnnnnnnnnnnnnnnnnnnnnnnnnnnnnnnnnnnnnnnnnnnnnnnnnnnnnnnnnnnnnnnnnnnnnnnnnnnnnnnnnnnnnnnnnnnnnnnnnnnnnnnnnnnnnnnnnnnnnnnnnnnnnnnnnnnnnnnnnnnnnnnnnnnnnnnnnnnnnnnnnnnnnnnnnnnnnnnnnnnnnnnnnnnnnnnnnnnnnnnnnnnnnnnnnnnnnnnnnnnnnnnnnnnnnnnnnnnnnnnnnnnnnnnnnnnnnnnnnnnnnnnnnnnnnnnnnnnnnnnnnnnnnnnnnnnnnnnnnnnnnnnnnnnnnnnnnnnnnnnnnnnnnnnnnnnnnnnnnnnnnnnnnnnnnnnnnnnnnnnnnnnnnnnnnnnnnnnnnnnnnnnnnnnnnnnnnnnnnnnnnnnnnnnnnnnnnnnnnnnnnnnnnnnnnnnnnnnnnnnnnnnnnnnnnnnnnnnnnnnnnnnnnnnnnnnnnnnnnnnnnnnnnnnnnnnnnnnnnnnnnnnnnnnnnnnnnnnnnnnnnnnnnnnnnnnnnnnnnnnnnnnnnnnnnnnnnnnnnnnnnnnnnnnnnnnnnnnnnnnnnnnnnnnnnnnnnnnnnnnnnnnnnnnnnnnnnnnnnnnnnnnnnnnnnnnnnnnnnnnnnnnnnnnnnnnnnnnnnnnnnnnnnnnnnnnnnnnnnnnnnnnnnnnnnnnnnnnnnnnnnnnnnnnnnnnnnnnnnnnnnnnnnnnnnnnnnnnnnnnnnnnnnnnnnnnnnnnnnnnnnnnnnnnnnnnnnnnnnnnnnnnnnnnnnnnnnnnnnnnnnnnnnnnnnnnnnnnnnnnnnnnnnnnnnnnnnnnnnnnnnnnnnnnnnnnnnnnnnnnnnnnnnnnnnnnnnnnnnnnnnnnnnnnnnnnnnnnnnnnnnnnnnnnnnnnnnnnnnnnnnnnnnnnnnnnnnnnnnnnnnnnnnnnnnnnnnnnnnnnnnnnnnnnnnnnnnnnnnnnnnnnnnnnnnnnnnnnnnnnnnnnnnnnnnnnnnnnnnnnnnnnnnnnnnnnnnnnnnnnnnnnnnnnnnnnnnnnnnnnnnnnnnnnnnnnnnnnnnnnnnnnnnnnnnnnnnnnnnnnnnnnnnnnnnnnnnnnnnnnnnnnnnnnnnnnnnnnnnnnnnnnnnnnnnnnnnnnnnnnnnnnnnnnnnnnnnnnnnnnnnnnnnnnnnnnnnnnnnnnnnnnnnnnnnnnnnnnnnnnnnnnnnnnnnnnnnnnnnnnnnnnnnnnnnnnnnnnnnnnnnnnnnnnnnnnnnnnnnnnnnnnnnnnnnnnnnnnnnnnnnnnnnnnnnnnnnnnnnnnnnnnnnnnnnnnnnnnnnnnnnnnnnnnnnnnnnnnnnnnnnnnnnnnnnnnnnnnnnnnnnnnnnnnnnnnnnnnnnnnnnnnnnnnnnnnnnnnnnnnnnnnnnnnnnnnnnnnnnnnnnnnnnnnnnnnnnnnnnnnnnnnnnnnnnnnnnnnnnnnnnnnnnnnnnnnnnnnnnnnnnnnnnnnnnnnnnnnnnnnnnnnnnnnnnnnnnnnnnnnnnnnnnnnnnnnnnnnnnnnnnnnnnnnnnnnnnnnnnnnnnnnnnnnnnnnnnnnnnnnnnnnnnnnnnnnnnnnnnnnnnnnnnnnnnnnnnnnnnnnnnnnnnnnnnnnnnnnnnnnnnnnnnnnnnnnnnnnnnnnnnnnnnnnnnnnnnnnnnnnnnnnnnnnnnnnnnnnnnnnnnnnnnnnnnnnnnnnnnnnnnnnnnnnnnnnnnnnnnnnnnnnnnnnnnnnnnnnnnnnnnnnnnnnnnnnnnnnnnnnnnnnnnnnnnnnnnnnnnnnnnnnnnnnnnnnnnnnnnnnnnnnnnnnnnnnnnnnnnnnnnnnnnnnnnnnnnnnnnnnnnnnnnnnnnnnnnnnnnnnnnnnnnnnnnnnnnnnnnnnnnnnnnnnnnnnnnnnnnnnnnnnnnnnnnnnnnnnnnnnnnnnnnnnnnnnnnnnnnnnnnnnnnnnnnnnnnnnnnnnnnnnnnnnnnnnnnnnnnnnnnnnnnnnnnnnnnnnnnnnnnnnnnnnnnnnnnnnnnnnnnnnnnnnnnnnnnnnnnnnnnnnnnnnnnnnnnnnnnnnnnnnnnnnnnnnnnnnnnnnnnnnnnnnnnnnnnnnnnnnnnnnnnnnnnnnnnnnnnnnnnnnnnnnnnnnnnnnnnnnnnnnnnnnnnnnnnnnnnnnnnnnnnnnnnnnnnnnnnnnnnnnnnnnnnnnnnnnnnnnnnnnnnnnnnnnnnnnnnnnnnnnnnnnnnnnnnnnnnnnnnnnnnnnnnnnnnnnnnnnnnnnnnnnnnnnnnnnnnnnnnnnnnnnnnnnnnnnnnnnnnnnnnnnnnnnnnnnnnnnnnnnnnnnnnnnnnnnnnnnnnnnnnnnnnnnnnnnnnnnnnnnnnnnnnnnnnnnnnnnnnnnnnnnnnnnnnnnnnnnnnnnnnnnnnnnnnnnnnnnnnnnnnnnnnnnnnnnnnnnnnnnnnnnnnnnnnnnnnnnnnnnnnnnnnnnnnnnnnnnnnnnnnnnnnnnnnnnnnnnnnnnnnnnnnnnnnnnnnnnnnnnnnnnnnnnnnnnnnnnnnnnnnnnnnnnnnnnnnnnnnnnnnnnnnnnnnnnnnnnnnnnnnnnnnnnnnnnnnnnnnnnnnnnnnnnnnnnnnnnnnnnnnnnnnnnnnnnnnnnnnnnnnnnnnnnnnnnnnnnnnnnnnnnnnnnnnnnnnnnnnnnnnnnnnnnnnnnnnnnnnnnnnnnnnnnnnnnnnnnnnnnnnnnnnnnnnnnnnnnnnnnnnnnnnnnnnnnnnnnnnnnnnnnnnnnnnnnnnnnnnnnnnnnnnnnnnnnnnnnnnnnnnnnnnnnnnnnnnnnnnnnnnnnnnnnnnnnnnnnnnnnnnnnnnnnnnnnnnnnnnnnnnnnnnnnnnnnnnnnnnnnnnnnnnnnnnnnnnnnnnnnnnnnnnnnnnnnnnnnnnnnnnnnnnnnnnnnnnnnnnnnnnnnnnnnnnnnnnnnnnnnnnnnnnnnnnnnnnnnnnnnnnnnnnnnnnnnnnnnnnnnnnnnnnnnnnnnnnnnnnnnnnnnnnnnnnnnnnnnnnnnnnnnnnnnnnnnnnnnnnnnnnnnnnnnnnnnnnnnnnnnnnnnnnnnnnnnnnnnnnnnnnnnnnnnnnnnnnnnnnnnnnnnnnnnnnnnnnnnnnnnnnnnnnnnnnnnnnnnnnnnnnnnnnnnnnnnnnnnnnnnnnnnnnnnnnnnnnnnnnnnnnnnnnnnnnnnnnnnnnnnnnnnnnnnnnnnnnnnnnnnnnnnnnnnnnnnnnnnnnnnnnnnnnnnnnnnnnnnnnnnnnnnnnnnnnnnnnnnnnnnnnnnnnnnnnnnnnnnnnnnnnnnnnnnnnnnnnnnnnnnnnnnnnnnnnnnnnnnnnnnnnnnnnnnnnnnnnnnnnnnnnnnnnnnnnnnnnnnnnnnnnnnnnnnnnnnnnnnnnnnnnnnnnnnnnnnnnnnnnnnnnnnnnnnnnnnnnnnnnnnnnnnnnnnnnnnnnnnnnnnnnnnnnnnnnnnnnnnnnnnnnnnnnnnnnnnnnnnnnnnnnnnnnnnnnnnnnnnnnnnnnnnnnnnnnnnnnnnnnnnnnnnnnnnnnnnnnnnnnnnnnnnnnnnnnnnnnnnnnnnnnnnnnnnnnnnnnnnnnnnnnnnnnnnnnnnnnnnnnnnnnnnnnnnnnnnnnnnnnnnnnnnnnnnnnnnnnnnnnnnnnnnnnnnnnnnnnnnnnnnnnnnnnnnnnnnnnnnnnnnnnnnnnnnnnnnnnnnnnnnnnnnnnnnnnnnnnnnnnnnnnnnnnnnnnnnnnnnnnnnnnnnnnnnnnnnnnnnnnnnnnnnnnnnnnnnnnnnnnnnnnnnnnnnnnnnnnnnnnnnnnnnnnnnnnnnnnnnnnnnnnnnnnnnnnnnnnnnnnnnnnnnnnnnnnnnnnnnnnnnnnnnnnnnnnnnnnnnnnnnnnnnnnnnnnnnnnnnnnnnnnnnnnnnnnnnnnnnnnnnnnnnnnnnnnnnnnnnnnnnnnnnnnnnnnnnnnnnnnnnnnnnnnnnnnnnnnnnnnnnnnnnnnnnnnnnnnnnnnnnnnnnnnnnnnnnnnnnnnnnnnnnnnnnnnnnnnnnnnnnnnnnnnnnnnnnnnnnnnnnnnnnnnnnnnnnnnnnnnnnnnnnnnnnnnnnnnnnnnnnnnnnnnnnnnnnnnnnnnnnnnnnnnnnnnnnnnnnnnnnnnnnnnnnnnnnnnnnnnnnnnnnnnnnnnnnnnnnnnnnnnnnnnnnnnnnnnnnnnnnnnnnnnnnnnnnnnnnnnnnnnnnnnnnnnnnnnnnnnnnnnnnnnnnnnnnnnnnnnnnnnnnnnnnnnnnnnnnnnnnnnnnnnnnnnnnnnnnnnnnnnnnnnnnnnnnnnnnnnnnnnnnnnnnnnnnnnnnnnnnnnnnnnnnnnnnnnnnnnnnnnnnnnnnnnnnnnnnnnnnnnnnnnnnnnnnnnnnnnnnnnnnnnnnnnnnnnnnnnnnnnnnnnnnnnnnnnnnnnnnnnnnnnnnnnnnnnnnnnnnnnnnnnnnnnnnnnnnnnnnnnnnnnnnnnnnnnnnnnnnnnnnnnnnnnnnnnnnnnnnnnnnnnnnnnnnnnnnnnnnnnnnnnnnnnnnnnnnnnnnnnnnnnnnnnnnnnnnnnnnnnnnnnnnnnnnnnnnnnnnnnnnnnnnnnnnnnnnnnnnnnnnnnnnnnnnnnnnnnnnnnnnnnnnnnnnnnnnnnnnnnnnnnnnnnnnnnnnnnnnnnnnnnnnnnnnnnnnnnnnnnnnnnnnnnnnnnnnnnnnnnnnnnnnnnnnnnnnnnnnnnnnnnnnnnnnnnnnnnnnnnnnnnnnnnnnnnnnnnnnnnnnnnnnnnnnnnnnnnnnnnnnnnnnnnnnnnnnnnnnnnnnnnnnnnnnnnnnnnnnnnnnnnnnnnnnnnnnnnnnnnnnnnnnnnnnnnnnnnnnnnnnnnnnnnnnnnnnnnnnnnnnnnnnnnnnnnnnnnnnnnnnnnnnnnnnnnnnnnnnnnnnnnnnnnnnnnnnnnnnnnnnnnnnnnnnnnnnnnnnnnnnnnnnnnnnnnnnnnnnnnnnnnnnnnnnnnnnnnnnnnnnnnnnnnnnnnnnnnnnnnnnnnnnnnnnnnnnnnnnnnnnnnnnnnnnnnnnnnnnnnnnnnnnnnnnnnnnnnnnnnnnnnnnnnnnnnnnnnnnnnnnnnnnnnnnnnnnnnnnnnnnnnnnnnnnnnnnnnnnnnnnnnnnnnnnnnnnnnnnnnnnnnnnnnnnnnnnnnnnnnnnnnnnnnnnnnnnnnnnnnnnnnnnnnnnnnnnnnnnnnnnnnnnnnnnnnnnnnnnnnnnnnnnnnnnnnnnnnnnnnnnnnnnnnnnnnnnnnnnnnnnnnnnnnnnnnnnnnnnnnnnnnnnnnnnnnnnnnnnnnnnnnnnnnnnnnnnnnnnnnnnnnnnnnnnnnnnnnnnnnnnnnnnnnnnnnnnnnnnnnnnnnnnnnnnnnnnnnnnnnnnnnnnnnnnnnnnnnnnnnnnnnnnnnnnnnnnnnnnnnnnnnnnnnnnnnnnnnnnnnnnnnnnnnnnnnnnnnnnnnnnnnnnnnnnnnnnnnnnnnnnnnnnnnnnnnnnnnnnnnnnnnnnnnnnnnnnnnnnnnnnnnnnnnnnnnnnnnnnnnnnnnnnnnnnnnnnnnnnnnnnnnnnnnnnnnnnnnnnnnnnnnnnnnnnnnnnnnnnnnnnnnnnnnnnnnnnnnnnnnnnnnnnnnnnnnnnnnnnnnnnnnnnnnnnnnnnnnnnnnnnnnnnnnnnnnnnnnnnnnnnnnnnnnnnnnnnnnnnnnnnnnnnnnnnnnnnnnnnnnnnnnnnnnnnnnnnnnnnnnnnnnnnnnnnnnnnnnnnnnnnnnnnnnnnnnnnnnnnnnnnnnnnnnnnnnnnnnnnnnnnnnnnnnnnnnnnnnnnnnnnnnnnnnnnnnnnnnnnnnnnnnnnnnnnnnnnnnnnnnnnnnnnnnnnnnnnnnnnnnnnnnnnnnnnnnnnnnnnnnnnnnnnnnnnnnnnnnnnnnnnnnnnnnnnnnnnnnnnnnnnnnnnnnnnnnnnnnnnnnnnnnnnnnnnnnnnnnnnnnnnnnnnnnnnnnnnnnnnnnnnnnnnnnnnnnnnnnnnnnnnnnnnnnnnnnnnnnnnnnnnnnnnnnnnnnnnnnnnnnnnnnnnnnnnnnnnnnnnnnnnnnnnnnnnnnnnnnnnnnnnnnnnnnnnnnnnnnnnnnnnnnnnnnnnnnnnnnnnnnnnnnnnnnnnnnnnnnnnnnnnnnnnnnnnnnnnnnnnnnnnnnnnnnnnnnnnnnnnnnnnnnnnnnnnnnnnnnnnnnnnnnnnnnnnnnnnnnnnnnnnnnnnnnnnnnnnnnnnnnnnnnnnnnnnnnnnnnnnnnnnnnnnnnnnnnnnnnnnnnnnnnnnnnnnnnnnnnnnnnnnnnnnnnnnnnnnnnnnnnnnnnnnnnnnnnnnnnnnnnnnnnnnnnnnnnnnnnnnnnnnnnnnnnnnnnnnnnnnnnnnnnnnnnnnnnnnnnnnnnnnnnnnnnnnnnnnnnnnnnnnnnnnnnnnnnnnnnnnnnnnnnnnnnnnnnnnnnnnnnnnnnnnnnnnnnnnnnnnnnnnnnnnnnnnnnnnnnnnnnnnnnnnnnnnnnnnnnnnnnnnnnnnnnnnnnnnnnnnnnnnnnnnnnnnnnnnnnnnnnnnnnnnnnnnnnnnnnnnnnnnnnnnnnnnnnnnnnnnnnnnnnnnnnnnnnnnnnnnnnnnnnnnnnnnnnnnnnnnnnnnnnnnnnnnnnnnnnnnnnnnnnnnnnnnnnnnnnnnnnnnnnnnnnnnnnnnnnnnnnnnnnnnnnnnnnnnnnnnnnnnnnnnnnnnnnnnnnnnnnnnnnnnnnnnnnnnnnnnnnnnnnnnnnnnnnnnnnnnnnnnnnnnnnnnnnnnnnnnnnnnnnnnnnnnnnnnnnnnnnnnnnnnnnnnnnnnnnnnnnnnnnnnnnnnnnnnnnnnnnnnnnnnnnnnnnnnnnnnnnnnnnnnnnnnnnnnnnnnnnnnnnnnnnnnnnnnnnnnnnnnnnnnnnnnnnnnnnnnnnnnnnnnnnnnnnnnnnnnnnnnnnnnnnnnnnnnnnnnnnnnnnnnnnnnnnnnnnnnnnnnnnnnnnnnnnnnnnnnnnnnnnnnnnnnnnnnnnnnnnnnnnnnnnnnnnnnnnnnnnnnnnnnnnnnnnnnnnnnnnnnnnnnnnnnnnnnnnnnnnnnnnnnnnnnnnnnnnnnnnnnnnnnnnnnnnnnnnnnnnnnnnnnnnnnnnnnnnnnnnnnnnnnnnnnnnnnnnnnnnnnnnnnnnnnnnnnnnnnnnnnnnnnnnnnnnnnnnnnnnnnnnnnnnnnnnnnnnnnnnnnnnnnnnnnnnnnnnnnnnnnnnnnnnnnnnnnnnnnnnnnnnnnnnnnnnnnnnnnnnnnnnnnnnnnnnnnnnnnnnnnnnnnnnnnnnnnnnnnnnnnnnnnnnnnnnnnnnnnnnnnnnnnnnnnnnnnnnnnnnnnnnnnnnnnnnnnnnnnnnnnnnnnnnnnnnnnnnnnnnnnnnnnnnnnnnnnnnnnnnnnnnnnnnnnnnnnnnnnnnnnnnnnnnnnnnnnnnnnnnnnnnnnnnnnnnnnnnnnnnnnnnnnnnnnnnnnnnnnnnnnnnnnnnnnnnnnnnnnnnnnnnnnnnnnnnnnnnnnnnnnnnnnnnnnnnnnnnnnnnnnnnnnnnnnnnnnnnnnnnnnnnnnnnnnnnnnnnnnnnnnnnnnnnnnnnnnnnnnnnnnnnnnnnnnnnnnnnnnnnnnnnnnnnnnnnnnnnnnnnnnnnnnnnnnnnnnnnnnnnnnnnnnnnnnnnnnnnnnnnnnnnnnnnnnnnnnnnnnnnnnnnnnnnnnnnnnnnnnnnnnnnnnnnnnnnnnnnnnnnnnnnnnnnnnnnnnnnnnnnnnnnnnnnnnnnnnnnnnnnnnnnnnnnnnnnnnnnnnnnnnnnnnnnnnnnnnnnnnnnnnnnnnnnnnnnnnnnnnnnnnnnnnnnnnnnnnnnnnnnnnnnnnnnnnnnnnnnnnnnnnnnnnnnnnnnnnnnnnnnnnnnnnnnnnnnnnnnnnnnnnnnnnnnnnnnnnnnnnnnnnnnnnnnnnnnnnnnnnnnnnnnnnnnnnnnnnnnnnnnnnnnnnnnnnnnnnnnnnnnnnnnnnnnnnnnnnnnnnnnnnnnnnnnnnnnnnnnnnnnnnnnnnnnnnnnnnnnnnnnnnnnnnnnnnnnnnnnnnnnnnnnnnnnnnnnnnnnnnnnnnnnnnnnnnnnnnnnnnnnnnnnnnnnnnnnnnnnnnnnnnnnnnnnnnnnnnnnnnnnnnnnnnnnnnnnnnnnnnnnnnnnnnnnnnnnnnnnnnnnnnnnnnnnnnnnnnnnnnnnnnnnnnnnnnnnnnnnnnnnnnnnnnnnnnnnnnnnnnnnnnnnnnnnnnnnnnnnnnnnnnnnnnnnnnnnnnnnnnnnnnnnnnnnnnnnnnnnnnnnnnnnnnnnnnnnnnnnnnnnnnnnnnnnnnnnnnnnnnnnnnnnnnnnnnnnnnnnnnnnnnnnnnnnnnnnnnnnnnnnnnnnnnnnnnnnnnnnnnnnnnnnnnnnnnnnnnnnnnnnnnnnnnnnnnnnnnnnnnnnnnnnnnnnnnnnnnnnnnnnnnnnnnnnnnnnnnnnnnnnnnnnnnnnnnnnnnnnnnnnnnnnnnnnnnnnnnnnnnnnnnnnnnnnnnnnnnnnnnnnnnnnnnnnnnnnnnnnnnnnnnnnnnnnnnnnnnnnnnnnnnnnnnnnnnnnnnnnnnnnnnnnnnnnnnnnnnnnnnnnnnnnnnnnnnnnnnnnnnnnnnnnnnnnnnnnnnnnnnnnnnnnnnnnnnnnnnnnnnnnnnnnnnnnnnnnnnnnnnnnnnnnnnnnnnnnnnnnnnnnnnnnnnnnnnnnnnnnnnnnnnnnnnnnnnnnnnnnnnnnnnnnnnnnnnnnnnnnnnnnnnnnnnnnnnnnnnnnnnnnnnnnnnnnnnnnnnnnnnnnnnnnnnnnnnnnnnnnnnnnnnnnnnnnnnnnnnnnnnnnnnnnnnnnnnnnnnnnnnnnnnnnnnnnnnnnnnnnnnnnnnnnnnnnnnnnnnnnnnnnnnnnnnnnnnnnnnnnnnnnnnnnnnnnnnnnnnnnnnnnnnnnnnnnnnnnnnnnnnnnnnnnnnnnnnnnnnnnnnnnnnnnnnnnnnnnnnnnnnnnnnnnnnnnnnnnnnnnnnnnnnnnnnnnnnnnnnnnnnnnnnnnnnnnnnnnnnnnnnnnnnnnnnnnnnnnnnnnnnnnnnnnnnnnnnnnnnnnnnnnnnnnnnnnnnnnnnnnnnnnnnnnnnnnnnnnnnnnnnnnnnnnnnnnnnnnnnnnnnnnnnnnnnnnnnnnnnnnnnnnnnnnnnnnnnnnnnnnnnnnnnnnnnnnnnnnnnnnnnnnnnnnnnnnnnnnnnnnnnnnnnnnnnnnnnnnnnnnnnnnnnnnnnnnnnnnnnnnnnnnnnnnnnnnnnnnnnnnnnnnnnnnnnnnnnnnnnnnnnnnnnnnnnnnnnnnnnnnnnnnnnnnnnnnnnnnnnnnnnnnnnnnnnnnnnnnnnnnnnnnnnnnnnnnnnnnnnnnnnnnnnnnnnnnnnnnnnnnnnnnnnnnnnnnnnnnnnnnnnnnnnnnnnnnnnnnnnnnnnnnnnnnnnnnnnnnnnnnnnnnnnnnnnnnnnnnnnnnnnnnnnnnnnnnnnnnnnnnnnnnnnnnnnnnnnnnnnnnnnnnnnnnnnnnnnnnnnnnnnnnnnnnnnnnnnnnnnnnnnnnnnnnnnnnnnnnnnnnnnnnnnnnnnnnnnnnnnnnnnnnnnnnnnnnnnnnnnnnnnnnnnnnnnnnnnnnnnnnnnnnnnnnnnnnnnnnnnnnnnnnnnnnnnnnnnnnnnnnnnnnnnnnnnnnnnnnnnnnnnnnnnnnnnnnnnnnnnnnnnnnnnnnnnnnnnnnnnnnnnnnnnnnnnnnnnnnnnnnnnnnnnnnnnnnnnnnnnnnnnnnnnnnnnnnnnnnnnnnnnnnnnnnnnnnnnnnnnnnnnnnnnnnnnnnnnnnnnnnnnnnnnnnnnnnnnnnnnnnnnnnnnnnnnnnnnnnnnnnnnnnnnnnnnnnnnnnnnnnnnnnnnnnnnnnnnnnnnnnnnnnnnnnnnnnnnnnnnnnnnnnnnnnnnnnnnnnnnnnnnnnnnnnnnnnnnnnnnnnnnnnnnnnnnnnnnnnnnnnnnnnnnnnnnnnnnnnnnnnnnnnnnnnnnnnnnnnnnnnnnnnnnnnnnnnnnnnnnnnnnnnnnnnnnnnnnnnnnnnnnnnnnnnnnnnnnnnnnnnnnnnnnnnnnnnnnnnnnnnnnnnnnnnnnnnnnnnnnnnnnnnnnnnnnnnnnnnnnnnnnnnnnnnnnnnnnnnnnnnnnnnnnnnnnnnnnnnnnnnnnnnnnnnnnnnnnnnnnnnnnnnnnnnnnnnnnnnnnnnnnnnnnnnnnnnnnnnnnnnnnnnnnnnnnnnnnnnnnnnnnnnnnnnnnnnnnnnnnnnnnnnnnnnnnnnnnnnnnnnnnnnnnnnnnnnnnnnnnnnnnnnnnnnnnnnnnnnnnnnnnnnnnnnnnnnnnnnnnnnnnnnnnnnnnnnnnnnnnnnnnnnnnnnnnnnnnnnnnnnnnnnnnnnnnnnnnnnnnnnnnnnnnnnnnnnnnnnnnnnnnnnnnnnnnnnnnnnnnnnnnnnnnnnnnnnnnnnnnnnnnnnnnnnnnnnnnnnnnnnnnnnnnnnnnnnnnnnnnnnnnnnnnnnnnnnnnnnnnnnnnnnnnnnnnnnnnnnnnnnnnnnnnnnnnnnnnnnnnnnnnnnnnnnnnnnnnnnnnnnnnnnnnnnnnnnnnnnnnnnnnnnnnnnnnnnnnnnnnnnnnnnnnnnnnnnnnnnnnnnnnnnnnnnnnnnnnnnnnnnnnnnnnnnnnnnnnnnnnnnnnnnnnnnnnnnnnnnnnnnnnnnnnnnnnnnnnnnnnnnnnnnnnnnnnnnnnnnnnnnnnnnnnnnnnnnnnnnnnnnnnnnnnnnnnnnnnnnnnnnnnnnnnnnnnnnnnnnnnnnnnnnnnnnnnnnnnnnnnnnnnnnnnnnnnnnnnnnnnnnnnnnnnnnnnnnnnnnnnnnnnnnnnnnnnnnnnnnnnnnnnnnnnnnnnnnnnnnnnnnnnnnnnnnnnnnnnnnnnnnnnnnnnnnnnnnnnnnnnnnnnnnnnnnnnnnnnnnnnnnnnnnnnnnnnnnnnnnnnnnnnnnnnnnnnnnnnnnnnnnnnnnnnnnnnnnnnnnnnnnnnnnnnnnnnnnnnnnnnnnnnnnnnnnnnnnnnnnnnnnnnnnnnnnnnnnnnnnnnnnnnnnnnnnnnnnnnnnnnnnnnnnnnnnnnnnnnnnnnnnnnnnnnnnnnnnnnnnnnnnnnnnnnnnnnnnnnnnnnnnnnnnnnnnnnnnnnnnnnnnnnnnnnnnnnnnnnnnnnnnnnnnnnnnnnnnnnnnnnnnnnnnnnnnnnnnnnnnnnnnnnnnnnnnnnnnnnnnnnnnnnnnnnnnnnnnnnnnnnnnnnnnnnnnnnnnnnnnnnnnnnnnnnnnnnnnnnnnnnnnnnnnnnnnnnnnnnnnnnnnnnnnnnnnnnnnnnnnnnnnnnnnnnnnnnnnnnnnnnnnnnnnnnnnnnnnnnnnnnnnnnnnnnnnnnnnnnnnnnnnnnnnnnnnnnnnnnnnnnnnnnnnnnnnnnnnnnnnnnnnnnnnnnnnnnnnnnnnnnnnnnnnnnnnnnnnnnnnnnnnnnnnnnnnnnnnnnnnnnnnnnnnnnnnnnnnnnnnnnnnnnnnnnnnnnnnnnnnnnnnnnnnnnnnnnnnnnnnnnnnnnnnnnnnnnnnnnnnnnnnnnnnnnnnnnnnnnnnnnnnnnnnnnnnnnnnnnnnnnnnnnnnnnnnnnnnnnnnnnnnnnnnnnnnnnnnnnnnnnnnnnnnnnnnnnnnnnnnnnnnnnnnnnnnnnnnnnnnnnnnnnnnnnnnnnnnnnnnnnnnnnnnnnnnnnnnnnnnnnnnnnnnnnnnnnnnnnnnnnnnnnnnnnnnnnnnnnnnnnnnnnnnnnnnnnnnnnnnnnnnnnnnnnnnnnnnnnnnnnnnnnnnnnnnnnnnnnnnnnnnnnnnnnnnnnnnnnnnnnnnnnnnnnnnnnnnnnnnnnnnnnnnnnnnnnnnnnnnnnnnnnnnnnnnnnnnnnnnnnnnnnnnnnnnnnnnnnnnnnnnnnnnnnnnnnnnnnnnnnnnnnnnnnnnnnnnnnnnnnnnnnnnnnnnnnnnnnnnnnnnnnnnnnnnnnnnnnnnnnnnnnnnnnnnnnnnnnnnnnnnnnnnnnnnnnnnnnnnnnnnnnnnnnnnnnnnnnnnnnnnnnnnnnnnnnnnnnnnnnnnnnnnnnnnnnnnnnnnnnnnnnnnnnnnnnnnnnnnnnnnnnnnnnnnnnnnnnnnnnnnnnnnnnnnnnnnnnnnnnnnnnnnnnnnnnnnnnnnnnnnnnnnnnnnnnnnnnnnnnnnnnnnnnnnnnnnnnnnnnnnnnnnnnnnnnnnnnnnnnnnnnnnnnnnnnnnnnnnnnnnnnnnnnnnnnnnnnnnnnnnnnnnnnnnnnnnnnnnnnnnnnnnnnnnnnnnnnnnnnnnnnnnnnnnnnnnnnnnnnnnnnnnnnnnnnnnnnnnnnnnnnnnnnnnnnnnnnnnnnnnnnnnnnnnnnnnnnnnnnnnnnnnnnnnnnnnnnnnnnnnnnnnnnnnnnnnnnnnnnnnnnnnnnnnnnnnnnnnnnnnnnnnnnnnnnnnnnnnnnnnnnnnnnnnnnnnnnnnnnnnnnnnnnnnnnnnnnnnnnnnnnnnnnnnnnnnnnnnnnnnnnnnnnnnnnnnnnnnnnnnnnnnnnnnnnnnnnnnnnnnnnnnnnnnnnnnnnnnnnnnnnnnnnnnnnnnnnnnnnnnnnnnnnnnnnnnnnnnnnnnnnnnnnnnnnnnnnnnnnnnnnnnnnnnnnnnnnnnnnnnnnnnnnnnnnnnnnnnnnnnnnnnnnnnnnnnnnnnnnnnnnnnnnnnnnnnnnnnnnnnnnnnnnnnnnnnnnnnnnnnnnnnnnnnnnnnnnnnnnnnnnnnnnnnnnnnnnnnnnnnnnnnnnnnnnnnnnnnnnnnnnnnnnnnnnnnnnnnnnnnnnnnnnnnnnnnnnnnnnnnnnnnnnnnnnnnnnnnnnnnnnnnnnnnnnnnnnnnnnnnnnnnnnnnnnnnnnnnnnnnnnnnnnnnnnnnnnnnnnnnnnnnnnnnnnnnnnnnnnnnnnnnnnnnnnnnnnnnnnnnnnnnnnnnnnnnnnnnnnnnnnnnnnnnnnnnnnnnnnnnnnnnnnnnnnnnnnnnnnnnnnnnnnnnnnnnnnnnnnnnnnnnnnnnnnnnnnnnnnnnnnnnnnnnnnnnnnnnnnnnnnnnnnnnnnnnnnnnnnnnnnnnnnnnnnnnnnnnnnnnnnnnnnnnnnnnnnnnnnnnnnnnnnnnnnnnnnnnnnnnnnnnnnnnnnnnnnnnnnnnnnnnnnnnnnnnnnnnnnnnnnnnnnnnnnnnnnnnnnnnnnnnnnnnnnnnnnnnnnnnnnnnnnnnnnnnnnnnnnnnnnnnnnnnnnnnnnnnnnnnnnnnnnnnnnnnnnnnnnnnnnnnnnnnnnnnnnnnnnnnnnnnnnnnnnnnnnnnnnnnnnnnnnnnnnnnnnnnnnnnnnnnnnnnnnnnnnnnnnnnnnnnnnnnnnnnnnnnnnnnnnnnnnnnnnnnnnnnnnnnnnnnnnnnnnnnnnnnnnnnnnnnnnnnnnnnnnnnnnnnnnnnnnnnnnnnnnnnnnnnnnnnnnnnnnnnnnnnnnnnnnnnnnnnnnnnnnnnnnnnnnnnnnnnnnnnnnnnnnnnnnnnnnnnnnnnnnnnnnnnnnnnnnnnnnnnnnnnnnnnnnnnnnnnnnnnnnnnnnnnnnnnnnnnnnnnnnnnnnnnnnnnnnnnnnnnnnnnnnnnnnnnnnnnnnnnnnnnnnnnnnnnnnnnnnnnnnnnnnnnnnnnnnnnnnnnnnnnnnnnnnnnnnnnnnnnnnnnnnnnnnnnnnnnnnnnnnnnnnnnnnnnnnnnnnnnnnnnnnnnnnnnnnnnnnnnnnnnnnnnnnnnnnnnnnnnnnnnnnnnnnnnnnnnnnnnnnnnnnnnnnnnnnnnnnnnnnnnnnnnnnnnnnnnnnnnnnnnnnnnnnnnnnnnnnnnnnnnnnnnnnnnnnnnnnnnnnnnnnnnnnnnnnnnnnnnnnnnnnnnnnnnnnnnnnnnnnnnnnnnnnnnnnnnnnnnnnnnnnnnnnnnnnnnnnnnnnnnnnnnnnnnnnnnnnnnnnnnnnnnnnnnnnnnnnnnnnnnnnnnnnnnnnnnnnnnnnnnnnnnnnnnnnnnnnnnnnnnnnnnnnnnnnnnnnnnnnnnnnnnnnnnnnnnnnnnnnnnnnnnnnnnnnnnnnnnnnnnnnnnnnnnnnnnnnnnnnnnnnnnnnnnnnnnnnnnnnnnnnnnnnnnnnnnnnnnnnnnnnnnnnnnnnnnnnnnnnnnnnnnnnnnnnnnnnnnnnnnnnnnnnnnnnnnnnnnnnnnnnnnnnnnnnnnnnnnnnnnnnnnnnnnnnnnnnnnnnnnnnnnnnnnnnnnnnnnnnnnnnnnnnnnnnnnnnnnnnnnnnnnnnnnnnnnnnnnnnnnnnnnnnnnnnnnnnnnnnnnnnnnnnnnnnnnnnnnnnnnnnnnnnnnnnnnnnnnnnnnnnnnnnnnnnnnnnnnnnnnnnnnnnnnnnnnnnnnnnnnnnnnnnnnnnnnnnnnnnnnnnnnnnnnnnnnnnnnnnnnnnnnnnnnnnnnnnnnnnnnnnnnnnnnnnnnnnnnnnnnnnnnnnnnnnnnnnnnnnnnnnnnnnnnnnnnnnnnnnnnnnnnnnnnnnnnnnnnnnnnnnnnnnnnnnnnnnnnnnnnnnnnnnnnnnnnnnnnnnnnnnnnnnnnnnnnnnnnnnnnnnnnnnnnnnnnnnnnnnnnnnnnnnnnnnnnnnnnnnnnnnnnnnnnnnnnnnnnnnnnnnnnnnnnnnnnnnnnnnnnnnnnnnnnnnnnnnnnnnnnnnnnnnnnnnnnnnnnnnnnnnnnnnnnnnnnnnnnnnnnnnnnnnnnnnnnnnnnnnnnnnnnnnnnnnnnnnnnnnnnnnnnnnnnnnnnnnnnnnnnnnnnnnnnnnnnnnnnnnnnnnnnnnnnnnnnnnnnnnnnnnnnnnnnnnnnnnnnnnnnnnnnnnnnnnnnnnnnnnnnnnnnnnnnnnnnnnnnnnnnnnnnnnnnnnnnnnnnnnnnnnnnnnnnnnnnnnnnnnnnnnnnnnnnnnnnnnnnnnnnnnnnnnnnnnnnnnnnnnnnnnnnnnnnnnnnnnnnnnnnnnnnnnnnnnnnnnnnnnnnnnnnnnnnnnnnnnnnnnnnnnnnnnnnnnnnnnnnnnnnnnnnnnnnnnnnnnnnnnnnnnnnnnnnnnnnnnnnnnnnnnnnnnnnnnnnnnnnnnnnnnnnnnnnnnnnnnnnnnnnnnnnnnnnnnnnnnnnnnnnnnnnnnnnnnnnnnnnnnnnnnnnnnnnnnnnnnnnnnnnnnnnnnnnnnnnnnnnnnnnnnnnnnnnnnnnnnnnnnnnnnnnnnnnnnnnnnnnnnnnnnnnnnnnnnnnnnnnnnnnnnnnnnnnnnnnnnnnnnnnnnnnnnnnnnnnnnnnnnnnnnnnnnnnnnnnnnnnnnnnnnnnnnnnnnnnnnnnnnnnnnnnnnnnnnnnnnnnnnnnnnnnnnnnnnnnnnnnnnnnnnnnnnnnnnnnnnnnnnnnnnnnnnnnnnnnnnnnnnnnnnnnnnnnnnnnnnnnnnnnnnnnnnnnnnnnnnnnnnnnnnnnnnnnnnnnnnnnnnnnnnnnnnnnnnnnnnnnnnnnnnnnnnnnnnnnnnnnnnnnnnnnnnnnnnnnnnnnnnnnnnnnnnnnnnnnnnnnnnnnnnnnnnnnnnnnnnnnnnnnnnnnnnnnnnnnnnnnnnnnnnnnnnnnnnnnnnnnnnnnnnnnnnnnnnnnnnnnnnnnnnnnnnnnnnnnnnnnnnnnnnnnnnnnnnnnnnnnnnnnnnnnnnnnnnnnnnnnnnnnnnnnnnnnnnnnnnnnnnnnnnnnnnnnnnnnnnnnnnnnnnnnnnnnnnnnnnnnnnnnnnnnnnnnnnnnnnnnnnnnnnnnnnnnnnnnnnnnnnnnnnnnnnnnnnnnnnnnnnnnnnnnnnnnnnnnnnnnnnnnnnnnnnnnnnnnnnnnnnnnnnnnnnnnnnnnnnnnnnnnnnnnnnnnnnnnnnnnnnnnnnnnnnnnnnnnnnnnnnnnnnnnnnnnnnnnnnnnnnnnnnnnnnnnnnnnnnnnnnnnnnnnnnnnnnnnnnnnnnnnnnnnnnnnnnnnnnnnnnnnnnnnnnnnnnnnnnnnnnnnnnnnnnnnnnnnnnnnnnnnnnnnnnnnnnnnnnnnnnnnnnnnnnnnnnnnnnnnnnnnnnnnnnnnnnnnnnnnnnnnnnnnnnnnnnnnnnnnnnnnnnnnnnnnnnnnnnnnnnnnnnnnnnnnnnnnnnnnnnnnnnnnnnnnnnnnnnnnnnnnnnnnnnnnnnnnnnnnnnnnnnnnnnnnnnnnnnnnnnnnnnnnnnnnnnnnnnnnnnnnnnnnnnnnnnnnnnnnnnnnnnnnnnnnnnnnnnnnnnnnnnnnnnnnnnnnnnnnnnnnnnnnnnnnnnnnnnnnnnnnnnnnnnnnnnnnnnnnnnnnnnnnnnnnnnnnnnnnnnnnnnnnnnnnnnnnnnnnnnnnnnnnnnnnnnnnnnnnnnnnnnnnnnnnnnnnnnnnnnnnnnnnnnnnnnnnnnnnnnnnnnnnnnnnnnnnnnnnnnnnnnnnnnnnnnnnnnnnnnnnnnnnnnnnnnnnnnnnnnnnnnnnnnnnnnnnnnnnnnnnnnnnnnnnnnnnnnnnnnnnnnnnnnnnnnnnnnnnnnnnnnnnnnnnnnnnnnnnnnnnnnnnnnnnnnnnnnnnnnnnnnnnnnnnnnnnnnnnnnnnnnnnnnnnnnnnnnnnnnnnnnnnnnnnnnnnnnnnnnnnnnnnnnnnnnnnnnnnnnnnnnnnnnnnnnnnnnnnnnnnnnnnnnnnnnnnnnnnnnnnnnnnnnnnnnnnnnnnnnnnnnnnnnnnnnnnnnnnnnnnnnnnnnnnnnnnnnnnnnnnnnnnnnnnnnnnnnnnnnnnnnnnnnnnnnnnnnnnnnnnnnnnnnnnnnnnnnnnnnnnnnnnnnnnnnnnnnnnnnnnnnnnnnnnnnnnnnnnnnnnnnnnnnnnnnnnnnnnnnnnnnnnnnnnnnnnnnnnnnnnnnnnnnnnnnnnnnnnnnnnnnnnnnnnnnnnnnnnnnnnnnnnnnnnnnnnnnnnnnnnnnnnnnnnnnnnnnnnnnnnnnnnnnnnnnnnnnnnnnnnnnnnnnnnnnnnnnnnnnnnnnnnnnnnnnnnnnnnnnnnnnnnnnnnnnnnnnnnnnnnnnnnnnnnnnnnnnnnnnnnnnnnnnnnnnnnnnnnnnnnnnnnnnnnnnnnnnnnnnnnnnnnnnnnnnnnnnnnnnnnnnnnnnnnnnnnnnnnnnnnnnnnnnnnnnnnnnnnnnnnnnnnnnnnnnnnnnnnnnnnnnnnnnnnnnnnnnnnnnnnnnnnnnnnnnnnnnnnnnnnnnnnnnnnnnnnnnnnnnnnnnnnnnnnnnnnnnnnnnnnnnnnnnnnnnnnnnnnnnnnnnnnnnnnnnnnnnnnnnnnnnnnnnnnnnnnnnnnnnnnnnnnnnnnnnnnnnnnnnnnnnnnnnnnnnnnnnnnnnnnnnnnnnnnnnnnnnnnnnnnnnnnnnnnnnnnnnnnnnnnnnnnnnnnnnnnnnnnnnnnnnnnnnnnnnnnnnnnnnnnnnnnnnnnnnnnnnnnnnnnnnnnnnnnnnnnnnnnnnnnnnnnnnnnnnnnnnnnnnnnnnnnnnnnnnnnnnnnnnnnnnnnnnnnnnnnnnnnnnnnnnnnnnnnnnnnnnnnnnnnnnnnnnnnnnnnnnnnnnnnnnnnnnnnnnnnnnnnnnnnnnnnnnnnnnnnnnnnnnnnnnnnnnnnnnnnnnnnnnnnnnnnnnnnnnnnnnnnnnnnnnnnnnnnnnnnnnnnnnnnnnnnnnnnnnnnnnnnnnnnnnnnnnnnnnnnnnnnnnnnnnnnnnnnnnnnnnnnnnnnnnnnnnnnnnnnnnnnnnnnnnnnnnnnnnnnnnnnnnnnnnnnnnnnnnnnnnnnnnnnnnnnnnnnnnnnnnnnnnnnnnnnnnnnnnnnnnnnnnnnnnnnnnnnnnnnnnnnnnnnnnnnnnnnnnnnnnnnnnnnnnnnnnnnnnnnnnnnnnnnnnnnnnnnnnnnnnnnnnnnnnnnnnnnnnnnnnnnnnnnnnnnnnnnnnnnnnnnnnnnnnnnnnnnnnnnnnnnnnnnnnnnnnnnnnnnnnnnnnnnnnnnnnnnnnnnnnnnnnnnnnnnnnnnnnnnnnnnnnnnnnnnnnnnnnnnnnnnnnnnnnnnnnnnnnnnnnnnnnnnnnnnnnnnnnnnnnnnnnnnnnnnnnnnnnnnnnnnnnnnnnnnnnnnnnnnnnnnnnnnnnnnnnnnnnnnnnnnnnnnnnnnnnnnnnnnnnnnnnnnnnnnnnnnnnnnnnnnnnnnnnnnnnnnnnnnnnnnnnnnnnnnnnnnnnnnnnnnnnnnnnnnnnnnnnnnnnnnnnnnnnnnnnnnnnnnnnnnnnnnnnnnnnnnnnnnnnnnnnnnnnnnnnnnnnnnnnnnnnnnnnnnnnnnnnnnnnnnnnnnnnnnnnnnnnnnnnnnnnnnnnnnnnnnnnnnnnnnnnnnnnnnnnnnnnnnnnnnnnnnnnnnnnnnnnnnnnnnnnnnnnnnnnnnnnnnnnnnnnnnnnnnnnnnnnnnnnnnnnnnnnnnnnnnnnnnnnnnnnnnnnnnnnnnnnnnnnnnnnnnnnnnnnnnnnnnnnnnnnnnnnnnnnnnnnnnnnnnnnnnnnnnnnnnnnnnnnnnnnnnnnnnnnnnnnnnnnnnnnnnnnnnnnnnnnnnnnnnnnnnnnnnnnnnnnnnnnnnnnnnnnnnnnnnnnnnnnnnnnnnnnnnnnnnnnnnnnnnnnnnnnnnnnnnnnnnnnnnnnnnnnnnnnnnnnnnnnnnnnnnnnnnnnnnnnnnnnnnnnnnnnnnnnnnnnnnnnnnnnnnnnnnnnnnnnnnnnnnnnnnnnnnnnnnnnnnnnnnnnnnnnnnnnnnnnnnnnnnnnnnnnnnnnnnnnnnnnnnnnnnnnnnnnnnnnnnnnnnnnnnnnnnnnnnnnnnnnnnnnnnnnnnnnnnnnnnnnnnnnnnnnnnnnnnnnnnnnnnnnnnnnnnnnnnnnnnnnnnnnnnnnnnnnnnnnnnnnnnnnnnnnnnnnnnnnnnnnnnnnnnnnnnnnnnnnnnnnnnnnnnnnnnnnnnnnnnnnnnnnnnnnnnnnnnnnnnnnnnnnnnnnnnnnnnnnnnnnnnnnnnnnnnnnnnnnnnnnnnnnnnnnnnnnnnnnnnnnnnnnnnnnnnnnnnnnnnnnnnnnnnnnnnnnnnnnnnnnnnnnnnnnnnnnnnnnnnnnnnnnnnnnnnnnnnnnnnnnnnnnnnnnnnnnnnnnnnnnnnnnnnnnnnnnnnnnnnnnnnnnnnnnnnnnnnnnnnnnnnnnnnnnnnnnnnnnnnnnnnnnnnnnnnnnnnnnnnnnnnnnnnnnnnnnnnnnnnnnnnnnnnnnnnnnnnnnnnnnnnnnnnnnnnnnnnnnnnnnnnnnnnnnnnnnnnnnnnnnnnnnnnnnnnnnnnnnnnnnnnnnnnnnnnnnnnnnnnnnnnnnnnnnnnnnnnnnnnnnnnnnnnnnnnnnnnnnnnnnnnnnnnnnnnnnnnnnnnnnnnnnnnnnnnnnnnnnnnnnnnnnnnnnnnnnnnnnnnnnnnnnnnnnnnnnnnnnnnnnnnnnnnnnnnnnnnnnnnnnnnnnnnnnnnnnnnnnnnnnnnnnnnnnnnnnnnnnnnnnnnnnnnnnnnnnnnnnnnnnnnnnnnnnnnnnnnnnnnnnnnnnnnnnnnnnnnnnnnnnnnnnnnnnnnnnnnnnnnnnnnnnnnnnnnnnnnnnnnnnnnnnnnnnnnnnnnnnnnnnnnnnnnnnnnnnnnnnnnnnnnnnnnnnnnnnnnnnnnnnnnnnnnnnnnnnnnnnnnnnnnnnnnnnnnnnnnnnnnnnnnnnnnnnnnnnnnnnnnnnnnnnnnnnnnnnnnnnnnnnnnnnnnnnnnnnnnnnnnnnnnnnnnnnnnnnnnnnnnnnnnnnnnnnnnnnnnnnnnnnnnnnnnnnnnnnnnnnnnnnnnnnnnnnnnnnnnnnnnnnnnnnnnnnnnnnnnnnnnnnnnnnnnnnnnnnnnnnnnnnnnnnnnnnnnnnnnnnnnnnnnnnnnnnnnnnnnnnnnnnnnnnnnnnnnnnnnnnnnnnnnnnnnnnnnnnnnnnnnnnnnnnnnnnnnnnnnnnnnnnnnnnnnnnnnnnnnnnnnnnnnnnnnnnnnnnnnnnnnnnnnnnnnnnnnnnnnnnnnnnnnnnnnnnnnnnnnnnnnnnnnnnnnnnnnnnnnnnnnnnnnnnnnnnnnnnnnnnnnnnnnnnnnnnnnnnnnnnnnnnnnnnnnnnnnnnnnnnnnnnnnnnnnnnnnnnnnnnnnnnnnnnnnnnnnnnnnnnnnnnnnnnnnnnnnnnnnnnnnnnnnnnnnnnnnnnnnnnnnnnnnnnnnnnnnnnnnnnnnnnnnnnnnnnnnnnnnnnnnnnnnnnnnnnnnnnnnnnnnnnnnnnnnnnnnnnnnnnnnnnnnnnnnnnnnnnnnnnnnnnnnnnnnnnnnnnnnnnnnnnnnnnnnnnnnnnnnnnnnnnnnnnnnnnnnnnnnnnnnnnnnnnnnnnnnnnnnnnnnnnnnnnnnnnnnnnnnnnnnnnnnnnnnnnnnnnnnnnnnnnnnnnnnnnnnnnnnnnnnnnnnnnnnnnnnnnnnnnnnnnnnnnnnnnnnnnnnnnnnnnnnnnnnnnnnnnnnnnnnnnnnnnnnnnnnnnnnnnnnnnnnnnnnnnnnnnnnnnnnnnnnnnnnnnnnnnnnnnnnnnnnnnnnnnnnnnnnnnnnnnnnnnnnnnnnnnnnnnnnnnnnnnnnnnnnnnnnnnnnnnnnnnnnnnnnnnnnnnnnnnnnnnnnnnnnnnnnnnnnnnnnnnnnnnnnnnnnnnnnnnnnnnnnnnnnnnnnnnnnnnnnnnnnnnnnnnnnnnnnnnnnnnnnnnnnnnnnnnnnnnnnnnnnnnnnnnnnnnnnnnnnnnnnnnnnnnnnnnnnnnnnnnnnnnnnnnnnnnnnnnnnnnnnnnnnnnnnnnnnnnnnnnnnnnnnnnnnnnnnnnnnnnnnnnnnnnnnnnnnnnnnnnnnnnnnnnnnnnnnnnnnnnnnnnnnnnnnnnnnnnnnnnnnnnnnnnnnnnnnnnnnnnnnnnnnnnnnnnnnnnnnnnnnnnnnnnnnnnnnnnnnnnnnnnnnnnnnnnnnnnnnnnnnnnnnnnnnnnnnnnnnnnnnnnnnnnnnnnnnnnnnnnnnnnnnnnnnnnnnnnnnnnnnnnnnnnnnnnnnnnnnnnnnnnnnnnnnnnnnnnnnnnnnnnnnnnnnnnnnnnnnnnnnnnnnnnnnnnnnnnnnnnnnnnnnnnnnnnnnnnnnnnnnnnnnnnnnnnnnnnnnnnnnnnnnnnnnnnnnnnnnnnnnnnnnnnnnnnnnnnnnnnnnnnnnnnnnnnnnnnnnnnnnnnnnnnnnnnnnnnnnnnnnnnnnnnnnnnnnnnnnnnnnnnnnnnnnnnnnnnnnnnnnnnnnnnnnnnnnnnnnnnnnnnnnnnnnnnnnnnnnnnnnnnnnnnnnnnnnnnnnnnnnnnnnnnnnnnnnnnnnnnnnnnnnnnnnnnnnnnnnnnnnnnnnnnnnnnnnnnnnnnnnnnnnnnnnnnnnnnnnnnnnnnnnnnnnnnnnnnnnnnnnnnnnnnnnnnnnnnnnnnnnnnnnnnnnnnnnnnnnnnnnnnnnnnnnnnnnnnnnnnnnnnnnnnnnnnnnnnnnnnnnnnnnnnnnnnnnnnnnnnnnnnnnnnnnnnnnnnnnnnnnnnnnnnnnnnnnnnnnnnnnnnnnnnnnnnnnnnnnnnnnnnnnnnnnnnnnnnnnnnnnnnnnnnnnnnnnnnnnnnnnnnnnnnnnnnnnnnnnnnnnnnnnnnnnnnnnnnnnnnnnnnnnnnnnnnnnnnnnnnnnnnnnnnnnnnnnnnnnnnnnnnnnnnnnnnnnnnnnnnnnnnnnnnnnnnnnnnnnnnnnnnnnnnnnnnnnnnnnnnnnnnnnnnnnnnnnnnnnnnnnnnnnnnnnnnnnnnnnnnnnnnnnnnnnnnnnnnnnnnnnnnnnnnnnnnnnnnnnnnnnnnnnnnnnnnnnnnnnnnnnnnnnnnnnnnnnnnnnnnnnnnnnnnnnnnnnnnnnnnnnnnnnnnnnnnnnnnnnnnnnnnnnnnnnnnnnnnnnnnnnnnnnnnnnnnnnnnnnnnnnnnnnnnnnnnnnnnnnnnnnnnnnnnnnnnnnnnnnnnnnnnnnnnnnnnnnnnnnnnnnnnnnnnnnnnnnnnnnnnnnnnnnnnnnnnnnnnnnnnnnnnnnnnnnnnnnnnnnnnnnnnnnnnnnnnnnnnnnnnnnnnnnnnnnnnnnnnnnnnnnnnnnnnnnnnnnnnnnnnnnnnnnnnnnnnnnnnnnnnnnnnnnnnnnnnnnnnnnnnnnnnnnnnnnnnnnnnnnnnnnnnnnnnnnnnnnnnnnnnnnnnnnnnnnnnnnnnnnnnnnnnnnnnnnnnnnnnnnnnnnnnnnnnnnnnnnnnnnnnnnnnnnnnnnnnnnnnnnnnnnnnnnnnnnnnnnnnnnnnnnnnnnnnnnnnnnnnnnnnnnnnnnnnnnnnnnnnnnnnnnnnnnnnnnnnnnnnnnnnnnnnnnnnnnnnnnnnnnnnnnnnnnnnnnnnnnnnnnnnnnnnnnnnnnnnnnnnnnnnnnnnnnnnnnnnnnnnnnnnnnnnnnnnnnnnnnnnnnnnnnnnnnnnnnnnnnnnnnnnnnnnnnnnnnnnnnnnnnnnnnnnnnnnnnnnnnnnnnnnnnnnnnnnnnnnnnnnnnnnnnnnnnnnnnnnnnnnnnnnnnnnnnnnnnnnnnnnnnnnnnnnnnnnnnnnnnnnnnnnnnnnnnnnnnnnnnnnnnnnnnnnnnnnnnnnnnnnnnnnnnnnnnnnnnnnnnnnnnnnnnnnnnnnnnnnnnnnnnnnnnnnnnnnnnnnnnnnnnnnnnnnnnnnnnnnnnnnnnnnnnnnnnnnnnnnnnnnnnnnnnnnnnnnnnnnnnnnnnnnnnnnnnnnnnnnnnnnnnnnnnnnnnnnnnnnnnnnnnnnnnnnnnnnnnnnnnnnnnnnnnnnnnnnnnnnnnnnnnnnnnnnnnnnnnnnnnnnnnnnnnnnnnnnnnnnnnnnnnnnnnnnnnnnnnnnnnnnnnnnnnnnnnnnnnnnnnnnnnnnnnnnnnnnnnnnnnnnnnnnnnnnnnnnnnnnnnnnnnnnnnnnnnnnnnnnnnnnnnnnnnnnnnnnnnnnnnnnnnnnnnnnnnnnnnnnnnnnnnnnnnnnnnnnnnnnnnnnnnnnnnnnnnnnnnnnnnnnnnnnnnnnnnnnnnnnnnnnnnnnnnnnnnnnnnnnnnnnnnnnnnnnnnnnnnnnnnnnnnnnnnnnnnnnnnnnnnnnnnnnnnnnnnnnnnnnnnnnnnnnnnnnnnnnnnnnnnnnnnnnnnnnnnnnnnnnnnnnnnnnnnnnnnnnnnnnnnnnnnnnnnnnnnnnnnnnnnnnnnnnnnnnnnnnnnnnnnnnnnnnnnnnnnnnnnnnnnnnnnnnnnnnnnnnnnnnnnnnnnnnnnnnnnnnnnnnnnnnnnnnnnnnnnnnnnnnnnnnnnnnnnnnnnnnnnnnnnnnnnnnnnnnnnnnnnnnnnnnnnnnnnnnnnnnnnnnnnnnnnnnnnnnnnnnnnnnnnnnnnnnnnnnnnnnnnnnnnnnnnnnnnnnnnnnnnnnnnnnnnnnnnnnnnnnnnnnnnnnnnnnnnnnnnnnnnnnnnnnnnnnnnnnnnnnnnnnnnnnnnnnnnnnnnnnnnnnnnnnnnnnnnnnnnnnnnnnnnnnnnnnnnnnnnnnnnnnnnnnnnnnnnnnnnnnnnnnnnnnnnnnnnnnnnnnnnnnnnnnnnnnnnnnnnnnnnnnnnnnnnnnnnnnnnnnnnnnnnnnnnnnnnnnnnnnnnnnnnnnnnnnnnnnnnnnnnnnnnnnnnnnnnnnnnnnnnnnnnnnnnnnnnnnnnnnnnnnnnnnnnnnnnnnnnnnnnnnnnnnnnnnnnnnnnnnnnnnnnnnnnnnnnnnnnnnnnnnnnnnnnnnnnnnnnnnnnnnnnnnnnnnnnnnnnnnnnnnnnnnnnnnnnnnnnnnnnnnnnnnnnnnnnnnnnnnnnnnnnnnnnnnnnnnnnnnnnnnnnnnnnnnnnnnnnnnnnnnnnnnnnnnnnnnnnnnnnnnnnnnnnnnnnnnnnnnnnnnnnnnnnnnnnnnnnnnnnnnnnnnnnnnnnnnnnnnnnnnnnnnnnnnnnnnnnnnnnnnnnnnnnnnnnnnnnnnnnnnnnnnnnnnnnnnnnnnnnnnnnnnnnnnnnnnnnnnnnnnnnnnnnnnnnnnnnnnnnnnnnnnnnnnnnnnnnnnnnnnnnnnnnnnnnnnnnnnnnnnnnnnnnnnnnnnnnnnnnnnnnnnnnnnnnnnnnnnnnnnnnnnnnnnnnnnnnnnnnnnnnnnnnnnnnnnnnnnnnnnnnnnnnnnnnnnnnnnnnnnnnnnnnnnnnnnnnnnnnnnnnnnnnnnnnnnnnnnnnnnnnnnnnnnnnnnnnnnnnnnnnnnnnnnnnnnnnnnnnnnnnnnnnnnnnnnnnnnnnnnnnnnnnnnnnnnnnnnnnnnnnnnnnnnnnnnnnnnnnnnnnnnnnnnnnnnnnnnnnnnnnnnnnnnnnnnnnnnnnnnnnnnnnnnnnnnnnnnnnnnnnnnnnnnnnnnnnnnnnnnnnnnnnnnnnnnnnnnnnnnnnnnnnnnnnnnnnnnnnnnnnnnnnnnnnnnnnnnnnnnnnnnnnnnnnnnnnnnnnnnnnnnnnnnnnnnnnnnnnnnnnnnnnnnnnnnnnnnnnnnnnnnnnnnnnnnnnnnnnnnnnnnnnnnnnnnnnnnnnnnnnnnnnnnnnnnnnnnnnnnnnnnnnnnnnnnnnnnnnnnnnnnnnnnnnnnnnnnnnnnnnnnnnnnnnnnnnnnnnnnnnnnnnnnnnnnnnnnnnnnnnnnnnnnnnnnnnnnnnnnnnnnnnnnnnnnnnnnnnnnnnnnnnnnnnnnnnnnnnnnnnnnnnnnnnnnnnnnnnnnnnnnnnnnnnnnnnnnnnnnnnnnnnnnnnnnnnnnnnnnnnnnnnnnnnnnnnnnnnnnnnnnnnnnnnnnnnnnnnnnnnnnnnnnnnnnnnnnnnnnnnnnnnnnnnnnnnnnnnnnnnnnnnnnnnnnnnnnnnnnnnnnnnnnnnnnnnnnnnnnnnnnnnnnnnnnnnnnnnnnnnnnnnnnnnnnnnnnnnnnnnnnnnnnnnnnnnnnnnnnnnnnnnnnnnnnnnnnnnnnnnnnnnnnnnnnnnnnnnnnnnnnnnnnnnnnnnnnnnnnnnnnnnnnnnnnnnnnnnnnnnnnnnnnnnnnnnnnnnnnnnnnnnnnnnnnnnnnnnnnnnnnnnnnnnnnnnnnnnnnnnnnnnnnnnnnnnnnnnnnnnnnnnnnnnnnnnnnnnnnnnnnnnnnnnnnnnnnnnnnnnnnnnnnnnnnnnnnnnnnnnnnnnnnnnnnnnnnnnnnnnnnnnnnnnnnnnnnnnnnnnnnnnnnnnnnnnnnnnnnnnnnnnnnnnnnnnnnnnnnnnnnnnnnnnnnnnnnnnnnnnnnnnnnnnnnnnnnnnnnnnnnnnnnnnnnnnnnnnnnnnnnnnnnnnnnnnnnnnnnnnnnnnnnnnnnnnnnnnnnnnnnnnnnnnnnnnnnnnnnnnnnnnnnnnnnnnnnnnnnnnnnnnnnnnnnnnnnnnnnnnnnnnnnnnnnnnnnnnnnnnnnnnnnnnnnnnnnnnnnnnnnnnnnnnnnnnnnnnnnnnnnnnnnnnnnnnnnnnnnnnnnnnnnnnnnnnnnnnnnnnnnnnnnnnnnnnnnnnnnnnnnnnnnnnnnnnnnnnnnnnnnnnnnnnnnnnnnnnnnnnnnnnnnnnnnnnnnnnnnnnnnnnnnnnnnnnnnnnnnnnnnnnnnnnnnnnnnnnnnnnnnnnnnnnnnnnnnnnnnnnnnnnnnnnnnnnnnnnnnnnnnnnnnnnnnnnnnnnnnnnnnnnnnnnnnnnnnnnnnnnnnnnnnnnnnnnnnnnnnnnnnnnnnnnnnnnnnnnnnnnnnnnnnnnnnnnnnnnnnnnnnnnnnnnnnnnnnnnnnnnnnnnnnnnnnnnnnnnnnnnnnnnnnnnnnnnnnnnnnnnnnnnnnnnnnnnnnnnnnnnnnnnnnnnnnnnnnnnnnnnnnnnnnnnnnnnnnnnnnnnnnnnnnnnnnnnnnnnnnnnnnnnnnnnnnnnnnnnnnnnnnnnnnnnnnnnnnnnnnnnnnnnnnnnnnnnnnnnnnnnnnnnnnnnnnnnnnnnnnnnnnnnnnnnnnnnnnnnnnnnnnnnnnnnnnnnnnnnnnnnnnnnnnnnnnnnnnnnnnnnnnnnnnnnnnnnnnnnnnnnnnnnnnnnnnnnnnnnnnnnnnnnnnnnnnnnnnnnnnnnnnnnnnnnnnnnnnnnnnnnnnnnnnnnnnnnnnnnnnnnnnnnnnnnnnnnnnnnnnnnnnnnnnnnnnnnnnnnnnnnnnnnnnnnnnnnnnnnnnnnnnnnnnnnnnnnnnnnnnnnnnnnnnnnnnnnnnnnnnnnnnnnnnnnnnnnnnnnnnnnnnnnnnnnnnnnnnnnnnnnnnnnnnnnnnnnnnnnnnnnnnnnnnnnnnnnnnnnnnnnnnnnnnnnnnnnnnnnnnnnnnnnnnnnnnnnnnnnnnnnnnnnnnnnnnnnnnnnnnnnnnnnnnnnnnnnnnnnnnnnnnnnnnnnnnnnnnnnnnnnnnnnnnnnnnnnnnnnnnnnnnnnnnnnnnnnnnnnnnnnnnnnnnnnnnnnnnnnnnnnnnnnnnnnnnnnnnnnnnnnnnnnnnnnnnnnnnnnnnnnnnnnnnnnnnnnnnnnnnnnnnnnnnnnnnnnnnnnnnnnnnnnnnnnnnnnnnnnnnnnnnnnnnnnnnnnnnnnnnnnnnnnnnnnnnnnnnnnnnnnnnnnnnnnnnnnnnnnnnnnnnnnnnnnnnnnnnnnnnnnnnnnnnnnnnnnnnnnnnnnnnnnnnnnnnnnnnnnnnnnnnnnnnnnnnnnnnnnnnnnnnnnnnnnnnnnnnnnnnnnnnnnnnnnnnnnnnnnnnnnnnnnnnnnnnnnnnnnnnnnnnnnnnnnnnnnnnnnnnnnnnnnnnnnnnnnnnnnnnnnnnnnnnnnnnnnnnnnnnnnnnnnnnnnnnnnnnnnnnnnnnnnnnnnnnnnnnnnnnnnnnnnnnnnnnnnnnnnnnnnnnnnnnnnnnnnnnnnnnnnnnnnnnnnnnnnnnnnnnnnnnnnnnnnnnnnnnnnnnnnnnnnnnnnnnnnnnnnnnnnnnnnnnnnnnnnnnnnnnnnnnnnnnnnnnnnnnnnnnnnnnnnnnnnnnnnnnnnnnnnnnnnnnnnnnnnnnnnnnnnnnnnnnnnnnnnnnnnnnnnnnnnnnnnnnnnnnnnnnnnnnnnnnnnnnnnnnnnnnnnnnnnnnnnnnnnnnnnnnnnnnnnnnnnnnnnnnnnnnnnnnnnnnnnnnnnnnnnnnnnnnnnnnnnnnnnnnnnnnnnnnnnnnnnnnnnnnnnnnnnnnnnnnnnnnnnnnnnnnnnnnnnnnnnnnnnnnnnnnnnnnnnnnnnnnnnnnnnnnnnnnnnnnnnnnnnnnnnnnnnnnnnnnnnnnnnnnnnnnnnnnnnnnnnnnnnnnnnnnnnnnnnnnnnnnnnnnnnnnnnnnnnnnnnnnnnnnnnnnnnnnnnnnnnnnnnnnnnnnnnnnnnnnnnnnnnnnnnnnnnnnnnnnnnnnnnnnnnnnnnnnnnnnnnnnnnnnnnnnnnnnnnnnnnnnnnnnnnnnnnnnnnnnnnnnnnnnnnnnnnnnnnnnnnnnnnnnnnnnnnnnnnnnnnnnnnnnnnnnnnnnnnnnnnnnnnnnnnnnnnnnnnnnnnnnnnnnnnnnnnnnnnnnnnnnnnnnnnnnnnnnnnnnnnnnnnnnnnnnnnnnnnnnnnnnnnnnnnnnnnnnnnnnnnnnnnnnnnnnnnnnnnnnnnnnnnnnnnnnnnnnnnnnnnnnnnnnnnnnnnnnnnnnnnnnnnnnnnnnnnnnnnnnnnnnnnnnnnnnnnnnnnnnnnnnnnnnnnnnnnnnnnnnnnnnnnnnnnnnnnnnnnnnnnnnnnnnnnnnnnnnnnnnnnnnnnnnnnnnnnnnnnnnnnnnnnnnnnnnnnnnnnnnnnnnnnnnnnnnnnnnnnnnnnnnnnnnnnnnnnnnnnnnnnnnnnnnnnnnnnnnnnnnnnnnnnnnnnnnnnnnnnnnnnnnnnnnnnnnnnnnnnnnnnnnnnnnnnnnnnnnnnnnnnnnnnnnnnnnnnnnnnnnnnnnnnnnnnnnnnnnnnnnnnnnnnnnnnnnnnnnnnnnnnnnnnnnnnnnnnnnnnnnnnnnnnnnnnnnnnnnnnnnnnnnnnnnnnnnnnnnnnnnnnnnnnnnnnnnnnnnnnnnnnnnnnnnnnnnnnnnnnnnnnnnnnnnnnnnnnnnnnnnnnnnnnnnnnnnnnnnnnnnnnnnnnnnnnnnnnnnnnnnnnnnnnnnnnnnnnnnnnnnnnnnnnnnnnnnnnnnnnnnnnnnnnnnnnnnnnnnnnnnnnnnnnnnnnnnnnnnnnnnnnnnnnnnnnnnnnnnnnnnnnnnnnnnnnnnnnnnnnnnnnnnnnnnnnnnnnnnnnnnnnnnnnnnnnnnnnnnnnnnnnnnnnnnnnnnnnnnnnnnnnnnnnnnnnnnnnnnnnnnnnnnnnnnnnnnnnnnnnnnnnnnnnnnnnnnnnnnnnnnnnnnnnnnnnnnnnnnnnnnnnnnnnnnnnnnnnnnnnnnnnnnnnnnnnnnnnnnnnnnnnnnnnnnnnnnnnnnnnnnnnnnnnnnnnnnnnnnnnnnnnnnnnnnnnnnnnnnnnnnnnnnnnnnnnnnnnnnnnnnnnnnnnnnnnnnnnnnnnnnnnnnnnnnnnnnnnnnnnnnnnnnnnnnnnnnnnnnnnnnnnnnnnnnnnnnnnnnnnnnnnnnnnnnnnnnnnnnnnnnnnnnnnnnnnnnnnnnnnnnnnnnnnnnnnnnnnnnnnnnnnnnnnnnnnnnnnnnnnnnnnnnnnnnnnnnnnnnnnnnnnnnnnnnnnnnnnnnnnnnnnnnnnnnnnnnnnnnnnnnnnnnnnnnnnnnnnnnnnnnnnnnnnnnnnnnnnnnnnnnnnnnnnnnnnnnnnnnnnnnnnnnnnnnnnnnnnnnnnnnnnnnnnnnnnnnnnnnnnnnnnnnnnnnnnnnnnnnnnnnnnnnnnnnnnnnnnnnnnnnnnnnnnnnnnnnnnnnnnnnnnnnnnnnnnnnnnnnnnnnnnnnnnnnnnnnnnnnnnnnnnnnnnnnnnnnnnnnnnnnnnnnnnnnnnnnnnnnnnnnnnnnnnnnnnnnnnnnnnnnnnnnnnnnnnnnnnnnnnnnnnnnnnnnnnnnnnnnnnnnnnnnnnnnnnnnnnnnnnnnnnnnnnnnnnnnnnnnnnnnnnnnnnnnnnnnnnnnnnnnnnnnnnnnnnnnnnnnnnnnnnnnnnnnnnnnnnnnnnnnnnnnnnnnnnnnnnnnnnnnnnnnnnnnnnnnnnnnnnnnnnnnnnnnnnnnnnnnnnnnnnnnnnnnnnnnnnnnnnnnnnnnnnnnnnnnnnnnnnnnnnnnnnnnnnnnnnnnnnnnnnnnnnnnnnnnnnnnnnnnnnnnnnnnnnnnnnnnnnnnnnnnnnnnnnnnnnnnnnnnnnnnnnnnnnnnnnnnnnnnnnnnnnnnnnnnnnnnnnnnnnnnnnnnnnnnnnnnnnnnnnnnnnnnnnnnnnnnnnnnnnnnnnnnnnnnnnnnnnnnnnnnnnnnnnnnnnnnnnnnnnnnnnnnnnnnnnnnnnnnnnnnnnnnnnnnnnnnnnnnnnnnnnnnnnnnnnnnnnnnnnnnnnnnnnnnnnnnnnnnnnnnnnnnnnnnnnnnnnnnnnnnnnnnnnnnnnnnnnnnnnnnnnnnnnnnnnnnnnnnnnnnnnnnnnnnnnnnnnnnnnnnnnnnnnnnnnnnnnnnnnnnnnnnnnnnnnnnnnnnnnnnnnnnnnnnnnnnnnnnnnnnnnnnnnnnnnnnnnnnnnnnnnnnnnnnnnnnnnnnnnnnnnnnnnnnnnnnnnnnnnnnnnnnnnnnnnnnnnnnnnnnnnnnnnnnnnnnnnnnnnnnnnnnnnnnnnnnnnnnnnnnnnnnnnnnnnnnnnnnnnnnnnnnnnnnnnnnnnnnnnnnnnnnnnnnnnnnnnnnnnnnnnnnnnnnnnnnnnnnnnnnnnnnnnnnnnnnnnnnnnnnnnnnnnnnnnnnnnnnnnnnnnnnnnnnnnnnnnnnnnnnnnnnnnnnnnnnnnnnnnnnnnnnnnnnnnnnnnnnnnnnnnnnnnnnnnnnnnnnnnnnnnnnnnnnnnnnnnnnnnnnnnnnnnnnnnnnnnnnnnnnnnnnnnnnnnnnnnnnnnnnnnnnnnnnnnnnnnnnnnnnnnnnnnnnnnnnnnnnnnnnnnnnnnnnnnnnnnnnnnnnnnnnnnnnnnnnnnnnnnnnnnnnnnnnnnnnnnnnnnnnnnnnnnnnnnnnnnnnnnnnnnnnnnnnnnnnnnnnnnnnnnnnnnnnnnnnnnnnnnnnnnnnnnnnnnnnnnnnnnnnnnnnnnnnnnnnnnnnnnnnnnnnnnnnnnnnnnnnnnnnnnnnnnnnnnnnnnnnnnnnnnnnnnnnnnnnnnnnnnnnnnnnnnnnnnnnnnnnnnnnnnnnnnnnnnnnnnnnnnnnnnnnnnnnnnnnnnnnnnnnnnnnnnnnnnnnnnnnnnnnnnnnnnnnnnnnnnnnnnnnnnnnnnnnnnnnnnnnnnnnnnnnnnnnnnnnnnnnnnnnnnnnnnnnnnnnnnnnnnnnnnnnnnnnnnnnnnnnnnnnnnnnnnnnnnnnnnnnnnnnnnnnnnnnnnnnnnnnnnnnnnnnnnnnnnnnnnnnnnnnnnnnnnnnnnnnnnnnnnnnnnnnnnnnnnnnnnnnnnnnnnnnnnnnnnnnnnnnnnnnnnnnnnnnnnnnnnnnnnnnnnnnnnnnnnnnnnnnnnnnnnnnnnnnnnnnnnnnnnnnnnnnnnnnnnnnnnnnnnnnnnnnnnnnnnnnnnnnnnnnnnnnnnnnnnnnnnnnnnnnnnnnnnnnnnnnnnnnnnnnnnnnnnnnnnnnnnnnnnnnnnnnnnnnnnnnnnnnnnnnnnnnnnnnnnnnnnnnnnnnnnnnnnnnnnnnnnnnnnnnnnnnnnnnnnnnnnnnnnnnnnnnnnnnnnnnnnnnnnnnnnnnnnnnnnnnnnnnnnnnnnnnnnnnnnnnnnnnnnnnnnnnnnnnnnnnnnnnnnnnnnnnnnnnnnnnnnnnnnnnnnnnnnnnnnnnnnnnnnnnnnnnnnnnnnnnnnnnnnnnnnnnnnnnnnnnnnnnnnnnnnnnnnnnnnnnnnnnnnnnnnnnnnnnnnnnnnnnnnnnnnnnnnnnnnnnnnnnnnnnnnnnnnnnnnnnnnnnnnnnnnnnnnnnnnnnnnnnnnnnnnnnnnnnnnnnnnnnnnnnnnnnnnnnnnnnnnnnnnnnnnnnnnnnnnnnnnnnnnnnnnnnnnnnnnnnnnnnnnnnnnnnnnnnnnnnnnnnnnnnnnnnnnnnnnnnnnnnnnnnnnnnnnnnnnnnnnnnnnnnnnnnnnnnnnnnnnnnnnnnnnnnnnnnnnnnnnnnnnnnnnnnnnnnnnnnnnnnnnnnnnnnnnnnnnnnnnnnnnnnnnnnnnnnnnnnnnnnnnnnnnnnnnnnnnnnnnnnnnnnnnnnnnnnnnnnnnnnnnnnnnnnnnnnnnnnnnnnnnnnnnnnnnnnnnnnnnnnnnnnnnnnnnnnnnnnnnnnnnnnnnnnnnnnnnnnnnnnnnnnnnnnnnnnnnnnnnnnnnnnnnnnnnnnnnnnnnnnnnnnnnnnnnnnnnnnnnnnnnnnnnnnnnnnnnnnnnnnnnnnnnnnnnnnnnnnnnnnnnnnnnnnnnnnnnnnnnnnnnnnnnnnnnnnnnnnnnnnnnnnnnnnnnnnnnnnnnnnnnnnnnnnnnnnnnnnnnnnnnnnnnnnnnnnnnnnnnnnnnnnnnnnnnnnnnnnnnnnnnnnnnnnnnnnnnnnnnnnnnnnnnnnnnnnnnnnnnnnnnnnnnnnnnnnnnnnnnnnnnnnnnnnnnnnnnnnnnnnnnnnnnnnnnnnnnnnnnnnnnnnnnnnnnnnnnnnnnnnnnnnnnnnnnnnnnnnnnnnnnnnnnnnnnnnnnnnnnnnnnnnnnnnnnnnnnnnnnnnnnnnnnnnnnnnnnnnnnnnnnnnnnnnnnnnnnnnnnnnnnnnnnnnnnnnnnnnnnnnnnnnnnnnnnnnnnnnnnnnnnnnnnnnnnnnnnnnnnnnnnnnnnnnnnnnnnnnnnnnnnnnnnnnnnnnnnnnnnnnnnnnnnnnnnnnnnnnnnnnnnnnnnnnnnnnnnnnnnnnnnnnnnnnnnnnnnnnnnnnnnnnnnnnnnnnnnnnnnnnnnnnnnnnnnnnnnnnnnnnnnnnnnnnnnnnnnnnnnnnnnnnnnnnnnnnnnnnnnnnnnnnnnnnnnnnnnnnnnnnnnnnnnnnnnnnnnnnnnnnnnnnnnnnnnnnnnnnnnnnnnnnnnnnnnnnnnnnnnnnnnnnnnnnnnnnnnnnnnnnnnnnnnnnnnnnnnnnnnnnnnnnnnnnnnnnnnnnnnnnnnnnnnnnnnnnnnnnnnnnnnnnnnnnnnnnnnnnnnnnnnnnnnnnnnnnnnnnnnnnnnnnnnnnnnnnnnnnnnnnnnnnnnnnnnnnnnnnnnnnnnnnnnnnnnnnnnnnnnnnnnnnnnnnnnnnnnnnnnnnnnnnnnnnnnnnnnnnnnnnnnnnnnnnnnnnnnnnnnnnnnnnnnnnnnnnnnnnnnnnnnnnnnnnnnnnnnnnnnnnnnnnnnnnnnnnnnnnnnnnnnnnnnnnnnnnnnnnnnnnnnnnnnnnnnnnnnnnnnnnnnnnnnnnnnnnnnnnnnnnnnnnnnnnnnnnnnnnnnnnnnnnnnnnnnnnnnnnnnnnnnnnnnnnnnnnnnnnnnnnnnnnnnnnnnnnnnnnnnnnnnnnnnnnnnnnnnnnnnnnnnnnnnnnnnnnnnnnnnnnnnnnnnnnnnnnnnnnnnnnnnnnnnnnnnnnnnnnnnnnnnnnnnnnnnnnnnnnnnnnnnnnnnnnnnnnnnnnnnnnnnnnnnnnnnnnnnnnnnnnnnnnnnnnnnnnnnnnnnnnnnnnnnnnnnnnnnnnnnnnnnnnnnnnnnnnnnnnnnnnnnnnnnnnnnnnnnnnnnnnnnnnnnnnnnnnnnnnnnnnnnnnnnnnnnnnnnnnnnnnnnnnnnnnnnnnnnnnnnnnnnnnnnnnnnnnnnnnnnnnnnnnnnnnnnnnnnnnnnnnnnnnnnnnnnnnnnnnnnnnnnnnnnnnnnnnnnnnnnnnnnnnnnnnnnnnnnnnnnnnnnnnnnnnnnnnnnnnnnnnnnnnnnnnnnnnnnnnnnnnnnnnnnnnnnnnnnnnnnnnnnnnnnnnnnnnnnnnnnnnnnnnnnnnnnnnnnnnnnnnnnnnnnnnnnnnnnnnnnnnnnnnnnnnnnnnnnnnnnnnnnnnnnnnnnnnnnnnnnnnnnnnnnnnnnnnnnnnnnnnnnnnnnnnnnnnnnnnnnnnnnnnnnnnnnnnnnnnnnnnnnnnnnnnnnnnnnnnnnnnnnnnnnnnnnnnnnnnnnnnnnnnnnnnnnnnnnnnnnnnnnnnnnnnnnnnnnnnnnnnnnnnnnnnnnnnnnnnnnnnnnnnnnnnnnnnnnnnnnnnnnnnnnnnnnnnnnnnnnnnnnnnnnnnnnnnnnnnnnnnnnnnnnnnnnnnnnnnnnnnnnnnnnnnnnnnnnnnnnnnnnnnnnnnnnnnnnnnnnnnnnnnnnnnnnnnnnnnnnnnnnnnnnnnnnnnnnnnnnnnnnnnnnnnnnnnnnnnnnnnnnnnnnnnnnnnnnnnnnnnnnnnnnnnnnnnnnnnnnnnnnnnnnnnnnnnnnnnnnnnnnnnnnnnnnnnnnnnnnnnnnnnnnnnnnnnnnnnnnnnnnnnnnnnnnnnnnnnnnnnnnnnnnnnnnnnnnnnnnnnnnnnnnnnnnnnnnnnnnnnnnnnnnnnnnnnnnnnnnnnnnnnnnnnnnnnnnnnnnnnnnnnnnnnnnnnnnnnnnnnnnnnnnnnnnnnnnnnnnnnnnnnnnnnnnnnnnnnnnnnnnnnnnnnnnnnnnnnnnnnnnnnnnnnnnnnnnnnnnnnnnnnnnnnnnnnnnnnnnnnnnnnnnnnnnnnnnnnnnnnnnnnnnnnnnnnnnnnnnnnnnnnnnnnnnnnnnnnnnnnnnnnnnnnnnnnnnnnnnnnnnnnnnnnnnnnnnnnnnnnnnnnnnnnnnnnnnnnnnnnnnnnnnnnnnnnnnnnnnnnnnnnnnnnnnnnnnnnnnnnnnnnnnnnnnnnnnnnnnnnnnnnnnnnnnnnnnnnnnnnnnnnnnnnnnnnnnnnnnnnnnnnnnnnnnnnnnnnnnnnnnnnnnnnnnnnnnnnnnnnnnnnnnnnnnnnnnnnnnnnnnnnnnnnnnnnnnnnnnnnnnnnnnnnnnnnnnnnnnnnnnnnnnnnnnnnnnnnnnnnnnnnnnnnnnnnnnnnnnnnnnnnnnnnnnnnnnnnnnnnnnnnnnnnnnnnnnnnnnnnnnnnnnnnnnnnnnnnnnnnnnnnnnnnnnnnnnnnnnnnnnnnnnnnnnnnnnnnnnnnnnnnnnnnnnnnnnnnnnnnnnnnnnnnnnnnnnnnnnnnnnnnnnnnnnnnnnnnnnnnnnnnnnnnnnnnnnnnnnnnnnnnnnnnnnnnnnnnnnnnnnnnnnnnnnnnnnnnnnnnnnnnnnnnnnnnnnnnnnnnnnnnnnnnnnnnnnnnnnnnnnnnnnnnnnnnnnnnnnnnnnnnnnnnnnnnnnnnnnnnnnnnnnnnnnnnnnnnnnnnnnnnnnnnnnnnnnnnnnnnnnnnnnnnnnnnnnnnnnnnnnnnnnnnnnnnnnnnnnnnnnnnnnnnnnnnnnnnnnnnnnnnnnnnnnnnnnnnnnnnnnnnnnnnnnnnnnnnnnnnnnnnnnnnnnnnnnnnnnnnnnnnnnnnnnnnnnnnnnnnnnnnnnnnnnnnnnnnnnnnnnnnnnnnnnnnnnnnnnnnnnnnnnnnnnnnnnnnnnnnnnnnnnnnnnnnnnnnnnnnnnnnnnnnnnnnnnnnnnnnnnnnnnnnnnnnnnnnnnnnnnnnnnnnnnnnnnnnnnnnnnnnnnnnnnnnnnnnnnnnnnnnnnnnnnnnnnnnnnnnnnnnnnnnnnnnnnnnnnnnnnnnnnnnnnnnnnnnnnnnnnnnnnnnnnnnnnnnnnnnnnnnnnnnnnnnnnnnnnnnnnnnnnnnnnnnnnnnnnnnnnnnnnnnnnnnnnnnnnnnnnnnnnnnnnnnnnnnnnnnnnnnnnnnnnnnnnnnnnnnnnnnnnnnnnnnnnnnnnnnnnnnnnnnnnnnnnnnnnnnnnnnnnnnnnnnnnnnnnnnnnnnnnnnnnnnnnnnnnnnnnnnnnnnnnnnnnnnnnnnnnnnnnnnnnnnnnnnnnnnnnnnnnnnnnnnnnnnnnnnnnnnnnnnnnnnnnnnnnnnnnnnnnnnnnnnnnnnnnnnnnnnnnnnnnnnnnnnnnnnnnnnnnnnnnnnnnnnnnnnnnnnnnnnnnnnnnnnnnnnnnnnnnnnnnnnnnnnnnnnnnnnnnnnnnnnnnnnnnnnnnnnnnnnnnnnnnnnnnnnnnnnnnnnnnnnnnnnnnnnnnnnnnnnnnnnnnnnnnnnnnnnnnnnnnnnnnnnnnnnnnnnnnnnnnnnnnnnnnnnnnnnnnnnnnnnnnnnnnnnnnnnnnnnnnnnnnnnnnnnnnnnnnnnnnnnnnnnnnnnnnnnnnnnnnnnnnnnnnnnnnnnnnnnnnnnnnnnnnnnnnnnnnnnnnnnnnnnnnnnnnnnnnnnnnnnnnnnnnnnnnnnnnnnnnnnnnnnnnnnnnnnnnnnnnnnnnnnnnnnnnnnnnnnnnnnnnnnnnnnnnnnnnnnnnnnnnnnnnnnnnnnnnnnnnnnnnnnnnnnnnnnnnnnnnnnnnnnnnnnnnnnnnnnnnnnnnnnnnnnnnnnnnnnnnnnnnnnnnnnnnnnnnnnnnnnnnnnnnnnnnnnnnnnnnnnnnnnnnnnnnnnnnnnnnnnnnnnnnnnnnnnnnnnnnnnnnnnnnnnnnnnnnnnnnnnnnnnnnnnnnnnnnnnnnnnnnnnnnnnnnnnnnnnnnnnnnnnnnnnnnnnnnnnnnnnnnnnnnnnnnnnnnnnnnnnnnnnnnnnnnnnnnnnnnnnnnnnnnnnnnnnnnnnnnnnnnnnnnnnnnnnnnnnnnnnnnnnnnnnnnnnnnnnnnnnnnnnnnnnnnnnnnnnnnnnnnnnnnnnnnnnnnnnnnnnnnnnnnnnnnnnnnnnnnnnnnnnnnnnnnnnnnnnnnnnnnnnnnnnnnnnnnnnnnnnnnnnnnnnnnnnnnnnnnnnnnnnnnnnnnnnnnnnnnnnnnnnnnnnnnnnnnnnnnnnnnnnnnnnnnnnnnnnnnnnnnnnnnnnnnnnnnnnnnnnnnnnnnnnnnnnnnnnnnnnnnnnnnnnnnnnnnnnnnnnnnnnnnnnnnnnnnnnnnnnnnnnnnnnnnnnnnnnnnnnnnnnnnnnnnnnnnnnnnnnnnnnnnnnnnnnnnnnnnnnnnnnnnnnnnnnnnnnnnnnnnnnnnnnnnnnnnnnnnnnnnnnnnnnnnnnnnnnnnnnnnnnnnnnnnnnnnnnnnnnnnnnnnnnnnnnnnnnnnnnnnnnnnnnnnnnnnnnnnnnnnnnnnnnnnnnnnnnnnnnnnnnnnnnnnnnnnnnnnnnnnnnnnnnnnnnnnnnnnnnnnnnnnnnnnnnnnnnnnnnnnnnnnnnnnnnnnnnnnnnnnnnnnnnnnnnnnnnnnnnnnnnnnnnnnnnnnnnnnnnnnnnnnnnnnnnnnnnnnnnnnnnnnnnnnnnnnnnnnnnnnnnnnnnnnnnnnnnnnnnnnnnnnnnnnnnnnnnnnnnnnnnnnnnnnnnnnnnnnnnnnnnnnnnnnnnnnnnnnnnnnnnnnnnnnnnnnnnnnnnnnnnnnnnnnnnnnnnnnnnnnnnnnnnnnnnnnnnnnnnnnnnnnnnnnnnnnnnnnnnnnnnnnnnnnnnnnnnnnnnnnnnnnnnnnnnnnnnnnnnnnnnnnnnnnnnnnnnnnnnnnnnnnnnnnnnnnnnnnnnnnnnnnnnnnnnnnnnnnnnnnnnnnnnnnnnnnnnnnnnnnnnnnnnnnnnnnnnnnnnnnnnnnnnnnnnnnnnnnnnnnnnnnnnnnnnnnnnnnnnnnnnnnnnnnnnnnnnnnnnnnnnnnnnnnnnnnnnnnnnnnnnnnnnnnnnnnnnnnnnnnnnnnnnnnnnnnnnnnnnnnnnnnnnnnnnnnnnnnnnnnnnnnnnnnnnnnnnnnnnnnnnnnnnnnnnnnnnnnnnnnnnnnnnnnnnnnnnnnnnnnnnnnnnnnnnnnnnnnnnnnnnnnnnnnnnnnnnnnnnnnnnnnnnnnnnnnnnnnnnnnnnnnnnnnnnnnnnnnnnnnnnnnnnnnnnnnnnnnnnnnnnnnnnnnnnnnnnnnnnnnnnnnnnnnnnnnnnnnnnnnnnnnnnnnnnnnnnnnnnnnnnnnnnnnnnnnnnnnnnnnnnnnnnnnnnnnnnnnnnnnnnnnnnnnnnnnnnnnnnnnnnnnnnnnnnnnnnnnnnnnnnnnnnnnnnnnnnnnnnnnnnnnnnnnnnnnnnnnnnnnnnnnnnnnnnnnnnnnnnnnnnnnnnnnnnnnnnnnnnnnnnnnnnnnnnnnnnnnnnnnnnnnnnnnnnnnnnnnnnnnnnnnnnnnnnnnnnnnnnnnnnnnnnnnnnnnnnnnnnnnnnnnnnnnnnnnnnnnnnnnnnnnnnnnnnnnnnnnnnnnnnnnnnnnnnnnnnnnnnnnnnnnnnnnnnnnnnnnnnnnnnnnnnnnnnnnnnnnnnnnnnnnnnnnnnnnnnnnnnnnnnnnnnnnnnnnnnnnnnnnnnnnnnnnnnnnnnnnnnnnnnnnnnnnnnnnnnnnnnnnnnnnnnnnnnnnnnnnnnnnnnnnnnnnnnnnnnnnnnnnnnnnnnnnnnnnnnnnnnnnnnnnnnnnnnnnnnnnnnnnnnnnnnnnnnnnnnnnnnnnnnnnnnnnnnnnnnnnnnnnnnnnnnnnnnnnnnnnnnnnnnnnnnnnnnnnnnnnnnnnnnnnnnnnnnnnnnnnnnnnnnnnnnnnnnnnnnnnnnnnnnnnnnnnnnnnnnnnnnnnnnnnnnnnnnnnnnnnnnnnnnnnnnnnnnnnnnnnnnnnnnnnnnnnnnnnnnnnnnnnnnnnnnnnnnnnnnnnnnnnnnnnnnnnnnnnnnnnnnnnnnnnnnnnnnnnnnnnnnnnnnnnnnnnnnnnnnnnnnnnnnnnnnnnnnnnnnnnnnnnnnnnnnnnnnnnnnnnnnnnnnnnnnnnnnnnnnnnnnnnnnnnnnnnnnnnnnnnnnnnnnnnnnnnnnnnnnnnnnnnnnnnnnnnnnnnnnnnnnnnnnnnnnnnnnnnnnnnnnnnnnnnnnnnnnnnnnnnnnnnnnnnnnnnnnnnnnnnnnnnnnnnnnnnnnnnnnnnnnnnnnnnnnnnnnnnnnnnnnnnnnnnnnnnnnnnnnnnnnnnnnnnnnnnnnnnnnnnnnnnnnnnnnnnnnnnnnnnnnnnnnnnnnnnnnnnnnnnnnnnnnnnnnnnnnnnnnnnnnnnnnnnnnnnnnnnnnnnnnnnnnnnnnnnnnnnnnnnnnnnnnnnnnnnnnnnnnnnnnnnnnnnnnnnnnnnnnnnnnnnnnnnnnnnnnnnnnnnnnnnnnnnnnnnnnnnnnnnnnnnnnnnnnnnnnnnnnnnnnnnnnnnnnnnnnnnnnnnnnnnnnnnnnnnnnnnnnnnnnnnnnnnnnnnnnnnnnnnnnnnnnnnnnnnnnnnnnnnnnnnnnnnnnnnnnnnnnnnnnnnnnnnnnnnnnnnnnnnnnnnnnnnnnnnnnnnnnnnnnnnnnnnnnnnnnnnnnnnnnnnnnnnnnnnnnnnnnnnnnnnnnnnnnnnnnnnnnnnnnnnnnnnnnnnnnnnnnnnnnnnnnnnnnnnnnnnnnnnnnnnnnnnnnnnnnnnnnnnnnnnnnnnnnnnnnnnnnnnnnnnnnnnnnnnnnnnnnnnnnnnnnnnnnnnnnnnnnnnnnnnnnnnnnnnnnnnnnnnnnnnnnnnnnnnnnnnnnnnnnnnnnnnnnnnnnnnnnnnnnnnnnnnnnnnnnnnnnnnnnnnnnnnnnnnnnnnnnnnnnnnnnnnnnnnnnnnnnnnnnnnnnnnnnnnnnnnnnnnnnnnnnnnnnnnnnnnnnnnnnnnnnnnnnnnnnnnnnnnnnnnnnnnnnnnnnnnnnnnnnnnnnnnnnnnnnnnnnnnnnnnnnnnnnnnnnnnnnnnnnnnnnnnnnnnnnnnnnnnnnnnnnnnnnnnnnnnnnnnnnnnnnnnnnnnnnnnnnnnnnnnnnnnnnnnnnnnnnnnnnnnnnnnnnnnnnnnnnnnnnnnnnnnnnnnnnnnnnnnnnnnnnnnnnnnnnnnnnnnnnnnnnnnnnnnnnnnnnnnnnnnnnnnnnnnnnnnnnnnnnnnnnnnnnnnnnnnnnnnnnnnnnnnnnnnnnnnnnnnnnnnnnnnnnnnnnnnnnnnnnnnnnnnnnnnnnnnnnnnnnnnnnnnnnnnnnnnnnnnnnnnnnnnnnnnnnnnnnnnnnnnnnnnnnnnnnnnnnnnnnnnnnnnnnnnnnnnnnnnnnnnnnnnnnnnnnnnnnnnnnnnnnnnnnnnnnnnnnnnnnnnnnnnnnnnnnnnnnnnnnnnnnnnnnnnnnnnnnnnnnnnnnnnnnnnnnnnnnnnnnnnnnnnnnnnnnnnnnnnnnnnnnnnnnnnnnnnnnnnnnnnnnnnnnnnnnnnnnnnnnnnnnnnnnnnnnnnnnnnnnnnnnnnnnnnnnnnnnnnnnnnnnnnnnnnnnnnnnnnnnnnnnnnnnnnnnnnnnnnnnnnnnnnnnnnnnnnnnnnnnnnnnnnnnnnnnnnnnnnnnnnnnnnnnnnnnnnnnnnnnnnnnnnnnnnnnnnnnnnnnnnnnnnnnnnnnnnnnnnnnnnnnnnnnnnnnnnnnnnnnnnnnnnnnnnnnnnnnnnnnnnnnnnnnnnnnnnnnnnnnnnnnnnnnnnnnnnnnnnnnnnnnnnnnnnnnnnnnnnnnnnnnnnnnnnnnnnnnnnnnnnnnnnnnnnnnnnnnnnnnnnnnnnnnnnnnnnnnnnnnnnnnnnnnnnnnnnnnnnnnnnnnnnnnnnnnnnnnnnnnnnnnnnnnnnnnnnnnnnnnnnnnnnnnnnnnnnnnnnnnnnnnnnnnnnnnnnnnnnnnnnnnnnnnnnnnnnnnnnnnnnnnnnnnnnnnnnnnnnnnnnnnnnnnnnnnnnnnnnnnnnnnnnnnnnnnnnnnnnnnnnnnnnnnnnnnnnnnnnnnnnnnnnnnnnnnnnnnnnnnnnnnnnnnnnnnnnnnnnnnnnnnnnnnnnnnnnnnnnnnnnnnnnnnnnnnnnnnnnnnnnnnnnnnnnnnnnnnnnnnnnnnnnnnnnnnnnnnnnnnnnnnnnnnnnnnnnnnnnnnnnnnnnnnnnnnnnnnnnnnnnnnnnnnnnnnnnnnnnnnnnnnnnnnnnnnnnnnnnnnnnnnnnnnnnnnnnnnnnnnnnnnnnnnnnnnnnnnnnnnnnnnnnnnnnnnnnnnnnnnnnnnnnnnnnnnnnnnnnnnnnnnnnnnnnnnnnnnnnnnnnnnnnnnnnnnnnnnnnnnnnnnnnnnnnnnnnnnnnnnnnnnnnnnnnnnnnnnnnnnnnnnnnnnnnnnnnnnnnnnnnnnnnnnnnnnnnnnnnnnnnnnnnnnnnnnnnnnnnnnnnnnnnnnnnnnnnnnnnnnnnnnnnnnnnnnnnnnnnnnnnnnnnnnnnnnnnnnnnnnnnnnnnnnnnnnnnnnnnnnnnnnnnnnnnnnnnnnnnnnnnnnnnnnnnnnnnnnnnnnnnnnnnnnnnnnnnnnnnnnnnnnnnnnnnnnnnnnnnnnnnnnnnnnnnnnnnnnnnnnnnnnnnnnnnnnnnnnnnnnnnnnnnnnnnnnnnnnnnnnnnnnnnnnnnnnnnnnnnnnnnnnnnnnnnnnnnnnnnnnnnnnnnnnnnnnnnnnnnnnnnnnnnnnnnnnnnnnnnnnnnnnnnnnnnnnnnnnnnnnnnnnnnnnnnnnnnnnnnnnnnnnnnnnnnnnnnnnnnnnnnnnnnnnnnnnnnnnnnnnnnnnnnnnnnnnnnnnnnnnnnnnnnnnnnnnnnnnnnnnnnnnnnnnnnnnnnnnnnnnnnnnnnnnnnnnnnnnnnnnnnnnnnnnnnnnnnnnnnnnnnnnnnnnnnnnnnnnnnnnnnnnnnnnnnnnnnnnnnnnnnnnnnnnnnnnnnnnnnnnnnnnnnnnnnnnnnnnnnnnnnnnnnnnnnnnnnnnnnnnnnnnnnnnnnnnnnnnnnnnnnnnnnnnnnnnnnnnnnnnnnnnnnnnnnnnnnnnnnnnnnnnnnnnnnnnnnnnnnnnnnnnnnnnnnnnnnnnnnnnnnnnnnnnnnnnnnnnnnnnnnnnnnnnnnnnnnnnnnnnnnnnnnnnnnnnnnnnnnnnnnnnnnnnnnnnnnnnnnnnnnnnnnnnnnnnnnnnnnnnnnnnnnnnnnnnnnnnnnnnnnnnnnnnnnnnnnnnnnnnnnnnnnnnnnnnnnnnnnnnnnnnnnnnnnnnnnnnnnnnnnnnnnnnnnnnnnnnnnnnnnnnnnnnnnnnnnnnnnnnnnnnnnnnnnnnnnnnnnnnnnnnnnnnnnnnnnnnnnnnnnnnnnnnnnnnnnnnnnnnnnnnnnnnnnnnnnnnnnnnnnnnnnnnnnnnnnnnnnnnnnnnnnnnnnnnnnnnnnnnnnnnnnnnnnnnnnnnnnnnnnnnnnnnnnnnnnnnnnnnnnnnnnnnnnnnnnnnnnnnnnnnnnnnnnnnnnnnnnnnnnnnnnnnnnnnnnnnnnnnnnnnnnnnnnnnnnnnnnnnnnnnnnnnnnnnnnnnnnnnnnnnnnnnnnnnnnnnnnnnnnnnnnnnnnnnnnnnnnnnnnnnnnnnnnnnnnnnnnnnnnnnnnnnnnnnnnnnnnnnnnnnnnnnnnnnnnnnnnnnnnnnnnnnnnnnnnnnnnnnnnnnnnnnnnnnnnnnnnnnnnnnnnnnnnnnnnnnnnnnnnnnnnnnnnnnnnnnnnnnnnnnnnnnnnnnnnnnnnnnnnnnnnnnnnnnnnnnnnnnnnnnnnnnnnnnnnnnnnnnnnnnnnnnnnnnnnnnnnnnnnnnnnnnnnnnnnnnnnnnnnnnnnnnnnnnnnnnnnnnnnnnnnnnnnnnnnnnnnnnnnnnnnnnnnnnnnnnnnnnnnnnnnnnnnnnnnnnnnnnnnnnnnnnnnnnnnnnnnnnnnnnnnnnnnnnnnnnnnnnnnnnnnnnnnnnnnnnnnnnnnnnnnnnnnnnnnnnnnnnnnnnnnnnnnnnnnnnnnnnnnnnnnnnnnnnnnnnnnnnnnnnnnnnnnnnnnnnnnnnnnnnnnnnnnnnnnnnnnnnnnnnnnnnnnnnnnnnnnnnnnnnnnnnnnnnnnnnnnnnnnnnnnnnnnnnnnnnnnnnnnnnnnnnnnnnnnnnnnnnnnnnnnnnnnnnnnnnnnnnnnnnnnnnnnnnnnnnnnnnnnnnnnnnnnnnnnnnnnnnnnnnnnnnnnnnnnnnnnnnnnnnnnnnnnnnnnnnnnnnnnnnnnnnnnnnnnnnnnnnnnnnnnnnnnnnnnnnnnnnnnnnnnnnnnnnnnnnnnnnnnnnnnnnnnnnnnnnnnnnnnnnnnnnnnnnnnnnnnnnnnnnnnnnnnnnnnnnnnnnnnnnnnnnnnnnnnnnnnnnnnnnnnnnnnnnnnnnnnnnnnnnnnnnnnnnnnnnnnnnnnnnnnnnnnnnnnnnnnnnnnnnnnnnnnnnnnnnnnnnnnnnnnnnnnnnnnnnnnnnnnnnnnnnnnnnnnnnnnnnnnnnnnnnnnnnnnnnnnnnnnnnnnnnnnnnnnnnnnnnnnnnnnnnnnnnnnnnnnnnnnnnnnnnnnnnnnnnnnnnnnnnnnnnnnnnnnnnnnnnnnnnnnnnnnnnnnnnnnnnnnnnnnnnnnnnnnnnnnnnnnnnnnnnnnnnnnnnnnnnnnnnnnnnnnnnnnnnnnnnnnnnnnnnnnnnnnnnnnnnnnnnnnnnnnnnnnnnnnnnnnnnnnnnnnnnnnnnnnnnnnnnnnnnnnnnnnnnnnnnnnnnnnnnnnnnnnnnnnnnnnnnnnnnnnnnnnnnnnnnnnnnnnnnnnnnnnnnnnnnnnnnnnnnnnnnnnnnnnnnnnnnnnnnnnnnnnnnnnnnnnnnnnnnnnnnnnnnnnnnnnnnnnnnnnnnnnnnnnnnnnnnnnnnnnnnnnnnnnnnnnnnnnnnnnnnnnnnnnnnnnnnnnnnnnnnnnnnnnnnnnnnnnnnnnnnnnnnnnnnnnnnnnnnnnnnnnnnnnnnnnnnnnnnnnnnnnnnnnnnnnnnnnnnnnnnnnnnnnnnnnnnnnnnnnnnnnnnnnnnnnnnnnnnnnnnnnnnnnnnnnnnnnnnnnnnnnnnnnnnnnnnnnnnnnnnnnnnnnnnnnnnnnnnnnnnnnnnnnnnnnnnnnnnnnnnnnnnnnnnnnnnnnnnnnnnnnnnnnnnnnnnnnnnnnnnnnnnnnnnnnnnnnnnnnnnnnnnnnnnnnnnnnnnnnnnnnnnnnnnnnnnnnnnnnnnnnnnnnnnnnnnnnnnnnnnnnnnnnnnnnnnnnnnnnnnnnnnnnnnnnnnnnnnnnnnnnnnnnnnnnnnnnnnnnnnnnnnnnnnnnnnnnnnnnnnnnnnnnnnnnnnnnnnnnnnnnnnnnnnnnnnnnnnnnnnnnnnnnnnnnnnnnnnnnnnnnnnnnnnnnnnnnnnnnnnnnnnnnnnnnnnnnnnnnnnnnnnnnnnnnnnnnnnnnnnnnnnnnnnnnnnnnnnnnnnnnnnnnnnnnnnnnnnnnnnnnnnnnnnnnnnnnnnnnnnnnnnnnnnnnnnnnnnnnnnnnnnnnnnnnnnnnnnnnnnnnnnnnnnnnnnnnnnnnnnnnnnnnnnnnnnnnnnnnnnnnnnnnnnnnnnnnnnnnnnnnnnnnnnnnnnnnnnnnnnnnnnnnnnnnnnnnnnnnnnnnnnnnnnnnnnnnnnnnnnnnnnnnnnnnnnnnnnnnnnnnnnnnnnnnnnnnnnnnnnnnnnnnnnnnnnnnnnnnnnnnnnnnnnnnnnnnnnnnnnnnnnnnnnnnnnnnnnnnnnnnnnnnnnnnnnnnnnnnnnnnnnnnnnnnnnnnnnnnnnnnnnnnnnnnnnnnnnnnnnnnnnnnnnnnnnnnnnnnnnnnnnnnnnnnnnnnnnnnnnnnnnnnnnnnnnnnnnnnnnnnnnnnnnnnnnnnnnnnnnnnnnnnnnnnnnnnnnnnnnnnnnnnnnnnnnnnnnnnnnnnnnnnnnnnnnnnnnnnnnnnnnnnnnnnnnnnnnnnnnnnnnnnnnnnnnnnnnnnnnnnnnnnnnnnnnnnnnnnnnnnnnnnnnnnnnnnnnnnnnnnnnnnnnnnnnnnnnnnnnnnnnnnnnnnnnnnnnnnnnnnnnnnnnnnnnnnnnnnnnnnnnnnnnnnnnnnnnnnnnnnnnnnnnnnnnnnnnnnnnnnnnnnnnnnnnnnnnnnnnnnnnnnnnnnnnnnnnnnnnnnnnnnnnnnnnnnnnnnnnnnnnnnnnnnnnnnnnnnnnnnnnnnnnnnnnnnnnnnnnnnnnnnnnnnnnnnnnnnnnnnnnnnnnnnnnnnnnnnnnnnnnnnnnnnnnnnnnnnnnnnnnnnnnnnnnnnnnnnnnnnnnnnnnnnnnnnnnnnnnnnnnnnnnnnnnnnnnnnnnnnnnnnnnnnnnnnnnnnnnnnnnnnnnnnnnnnnnnnnnnnnnnnnnnnnnnnnnnnnnnnnnnnnnnnnnnnnnnnnnnnnnnnnnnnnnnnnnnnnnnnnnnnnnnnnnnnnnnnnnnnnnnnnnnnnnnnnnnnnnnnnnnnnnnnnnnnnnnnnnnnnnnnnnnnnnnnnnnnnnnnnnnnnnnnnnnnnnnnnnnnnnnnnnnnnnnnnnnnnnnnnnnnnnnnnnnnnnnnnnnnnnnnnnnnnnnnnnnnnnnnnnnnnnnnnnnnnnnnnnnnnnnnnnnnnnnnnnnnnnnnnnnnnnnnnnnnnnnnnnnnnnnnnnnnnnnnnnnnnnnnnnnnnnnnnnnnnnnnnnnnnnnnnnnnnnnnnnnnnnnnnnnnnnnnnnnnnnnnnnnnnnnnnnnnnnnnnnnnnnnnnnnnnnnnnnnnnnnnnnnnnnnnnnnnnnnnnnnnnnnnnnnnnnnnnnnnnnnnnnnnnnnnnnnnnnnnnnnnnnnnnnnnnnnnnnnnnnnnnnnnnnnnnnnnnnnnnnnnnnnnnnnnnnnnnnnnnnnnnnnnnnnnnnnnnnnnnnnnnnnnnnnnnnnnnnnnnnnnnnnnnnnnnnnnnnnnnnnnnnnnnnnnnnnnnnnnnnnnnnnnnnnnnnnnnnnnnnnnnnnnnnnnnnnnnnnnnnnnnnnnnnnnnnnnnnnnnnnnnnnnnnnnnnnnnnnnnnnnnnnnnnnnnnnnnnnnnnnnnnnnnnnnnnnnnnnnnnnnnnnnnnnnnnnnnnnnnnnnnnnnnnnnnnnnnnnnnnnnnnnnnnnnnnnnnnnnnnnnnnnnnnnnnnnnnnnnnnnnnnnnnnnnnnnnnnnnnnnnnnnnnnnnnnnnnnnnnnnnnnnnnnnnnnnnnnnnnnnnnnnnnnnnnnnnnnnnnnnnnnnnnnnnnnnnnnnnnnnnnnnnnnnnnnnnnnnnnnnnnnnnnnnnnnnnnnnnnnnnnnnnnnnnnnnnnnnnnnnnnnnnnnnnnnnnnnnnnnnnnnnnnnnnnnnnnnnnnnnnnnnnnnnnnnnnnnnnnnnnnnnnnnnnnnnnnnnnnnnnnnnnnnnnnnnnnnnnnnnnnnnnnnnnnnnnnnnnnnnnnnnnnnnnnnnnnnnnnnnnnnnnnnnnnnnnnnnnnnnnnnnnnnnnnnnnnnnnnnnnnnnnnnnnnnnnnnnnnnnnnnnnnnnnnnnnnnnnnnnnnnnnnnnnnnnnnnnnnnnnnnnnnnnnnnnnnnnnnnnnnnnnnnnnnnnnnnnnnnnnnnnnnnnnnnnnnnnnnnnnnnnnnnnnnnnnnnnnnnnnnnnnnnnnnnnnnnnnnnnnnnnnnnnnnnnnnnnnnnnnnnnnnnnnnnnnnnnnnnnnnnnnnnnnnnnnnnnnnnnnnnnnnnnnnnnnnnnnnnnnnnnnnnnnnnnnnnnnnnnnnnnnnnnnnnnnnnnnnnnnnnnnnnnnnnnnnnnnnnnnnnnnnnnnnnnnnnnnnnnnnnnnnnnnnnnnnnnnnnnnnnnnnnnnnnnnnnnnnnnnnnnnnnnnnnnnnnnnnnnnnnnnnnnnnnnnnnnnnnnnnnnnnnnnnnnnnnnnnnnnnnnnnnnnnnnnnnnnnnnnnnnnnnnnnnnnnnnnnnnnnnnnnnnnnnnnnnnnnnnnnnnnnnnnnnnnnnnnnnnnnnnnnnnnnnnnnnnnnnnnnnnnnnnnnnnnnnnnnnnnnnnnnnnnnnnnnnnnnnnnnnnnnnnnnnnnnnnnnnnnnnnnnnnnnnnnnnnnnnnnnnnnnnnnnnnnnnnnnnnnnnnnnnnnnnnnnnnnnnnnnnnnnnnnnnnnnnnnnnnnnnnnnnnnnnnnnnnnnnnnnnnnnnnnnnnnnnnnnnnnnnnnnnnnnnnnnnnnnnnnnnnnnnnnnnnnnnnnnnnnnnnnnnnnnnnnnnnnnnnnnnnnnnnnnnnnnnnnnnnnnnnnnnnnnnnnnnnnnnnnnnnnnnnnnnnnnnnnnnnnnnnnnnnnnnnnnnnnnnnnnnnnnnnnnnnnnnnnnnnnnnnnnnnnnnnnnnnnnnnnnnnnnnnnnnnnnnnnnnnnnnnnnnnnnnnnnnnnnnnnnnnnnnnnnnnnnnnnnnnnnnnnnnnnnnnnnnnnnnnnnnnnnnnnnnnnnnnnnnnnnnnnnnnnnnnnnnnnnnnnnnnnnnnnnnnnnnnnnnnnnnnnnnnnnnnnnnnnnnnnnnnnnnnnnnnnnnnnnnnnnnnnnnnnnnnnnnnnnnnnnnnnnnnnnnnnnnnnnnnnnnnnnnnnnnnnnnnnnnnnnnnnnnnnnnnnnnnnnnnnnnnnnnnnnnnnnnnnnnnnnnnnnnnnnnnnnnnnnnnnnnnnnnnnnnnnnnnnnnnnnnnnnnnnnnnnnnnnnnnnnnnnnnnnnnnnnnnnnnnnnnnnnnnnnnnnnnnnnnnnnnnnnnnnnnnnnnnnnnnnnnnnnnnnnnnnnnnnnnnnnnnnnnnnnnnnnnnnnnnnnnnnnnnnnnnnnnnnnnnnnnnnnnnnnnnnnnnnnnnnnnnnnnnnnnnnnnnnnnnnnnnnnnnnnnnnnnnnnnnnnnnnnnnnnnnnnnnnnnnnnnnnnnnnnnnnnnnnnnnnnnnnnnnnnnnnnnnnnnnnnnnnnnnnnnnnnnnnnnnnnnnnnnnnnnnnnnnnnnnnnnnnnnnnnnnnnnnnnnnnnnnnnnnnnnnnnnnnnnnnnnnnnnnnnnnnnnnnnnnnnnnnnnnnnnnnnnnnnnnnnnnnnnnnnnnnnnnnnnnnnnnnnnnnnnnnnnnnnnnnnnnnnnnnnnnnnnnnnnnnnnnnnnnnnnnnnnnnnnnnnnnnnnnnnnnnnnnnnnnnnnnnnnnnnnnnnnnnnnnnnnnnnnnnnnnnnnnnnnnnnnnnnnnnnnnnnnnnnnnnnnnnnnnnnnnnnnnnnnnnnnnnnnnnnnnnnnnnnnnnnnnnnnnnnnnnnnnnnnnnnnnnnnnnnnnnnnnnnnnnnnnnnnnnnnnnnnnnnnnnnnnnnnnnnnnnnnnnnnnnnnnnnnnnnnnnnnnnnnnnnnnnnnnnnnnnnnnnnnnnnnnnnnnnnnnnnnnnnnnnnnnnnnnnnnnnnnnnnnnnnnnnnnnnnnnnnnnnnnnnnnnnnnnnnnnnnnnnnnnnnnnnnnnnnnnnnnnnnnnnnnnnnnnnnnnnnnnnnnnnnnnnnnnnnnnnnnnnnnnnnnnnnnnnnnnnnnnnnnnnnnnnnnnnnnnnnnnnnnnnnnnnnnnnnnnnnnnnnnnnnnnnnnnnnnnnnnnnnnnnnnnnnnnnnnnnnnnnnnnnnnnnnnnnnnnnnnnnnnnnnnnnnnnnnnnnnnnnnnnnnnnnnnnnnnnnnnnnnnnnnnnnnnnnnnnnnnnnnnnnnnnnnnnnnnnnnnnnnnnnnnnnnnnnnnnnnnnnnnnnnnnnnnnnnnnnnnnnnnnnnnnnnnnnnnnnnnnnnnnnnnnnnnnnnnnnnnnnnnnnnnnnnnnnnnnnnnnnnnnnnnnnnnnnnnnnnnnnnnnnnnnnnnnnnnnnnnnnnnnnnnnnnnnnnnnnnnnnnnnnnnnnnnnnnnnnnnnnnnnnnnnnnnnnnnnnnnnnnnnnnnnnnnnnnnnnnnnnnnnnnnnnnnnnnnnnnnnnnnnnnnnnnnnnnnnnnnnnnnnnnnnnnnnnnnnnnnnnnnnnnnnnnnnnnnnnnnnnnnnnnnnnnnnnnnnnnnnnnnnnnnnnnnnnnnnnnnnnnnnnnnnnnnnnnnnnnnnnnnnnnnnnnnnnnnnnnnnnnnnnnnnnnnnnnnnnnnnnnnnnnnnnnnnnnnnnnnnnnnnnnnnnnnnnnnnnnnnnnnnnnnnnnnnnnnnnnnnnnnnnnnnnnnnnnnnnnnnnnnnnnnnnnnnnnnnnnnnnnnnnnnnnnnnnnnnnnnnnnnnnnnnnnnnnnnnnnnnnnnnnnnnnnnnnnnnnnnnnnnnnnnnnnnnnnnnnnnnnnnnnnnnnnnnnnnnnnnnnnnnnnnnnnnnnnnnnnnnnnnnnnnnnnnnnnnnnnnnnnnnnnnnnnnnnnnnnnnnnnnnnnnnnnnnnnnnnnnnnnnnnnnnnnnnnnnnnnnnnnnnnnnnnnnnnnnnnnnnnnnnnnnnnnnnnnnnnnnnnnnnnnnnnnnnnnnnnnnnnnnnnnnnnnnnnnnnnnnnnnnnnnnnnnnnnnnnnnnnnnnnnnnnnnnnnnnnnnnnnnnnnnnnnnnnnnnnnnnnnnnnnnnnnnnnnnnnnnnnnnnnnnnnnnnnnnnnnnnnnnnnnnnnnnnnnnnnnnnnnnnnnnnnnnnnnnnnnnnnnnnnnnnnnnnnnnnnnnnnnnnnnnnnnnnnnnnnnnnnnnnnnnnnnnnnnnnnnnnnnnnnnnnnnnnnnnnnnnnnnnnnnnnnnnnnnnnnnnnnnnnnnnnnnnnnnnnnnnnnnnnnnnnnnnnnnnnnnnnnnnnnnnnnnnnnnnnnnnnnnnnnnnnnnnnnnnnnnnnnnnnnnnnnnnnnnnnnnnnnnnnnnnnnnnnnnnnnnnnnnnnnnnnnnnnnnnnnnnnnnnnnnnnnnnnnnnnnnnnnnnnnnnnnnnnnnnnnnnnnnnnnnnnnnnnnnnnnnnnnnnnnnnnnnnnnnnnnnnnnnnnnnnnnnnnnnnnnnnnnnnnnnnnnnnnnnnnnnnnnnnnnnnnnnnnnnnnnnnnnnnnnnnnnnnnnnnnnnnnnnnnnnnnnnnnnnnnnnnnnnnnnnnnnnnnnnnnnnnnnnnnnnnnnnnnnnnnnnnnnnnnnnnnnnnnnnnnnnnnnnnnnnnnnnnnnnnnnnnnnnnnnnnnnnnnnnnnnnnnnnnnnnnnnnnnnnnnnnnnnnnnnnnnnnnnnnnnnnnnnnnnnnnnnnnnnnnnnnnnnnnnnnnnnnnnnnnnnnnnnnnnnnnnnnnnnnnnnnnnnnnnnnnnnnnnnnnnnnnnnnnnnnnnnnnnnnnnnnnnnnnnnnnnnnnnnnnnnnnnnnnnnnnnnnnnnnnnnnnnnnnnnnnnnnnnnnnnnnnnnnnnnnnnnnnnnnnnnnnnnnnnnnnnnnnnnnnnnnnnnnnnnnnnnnnnnnnnnnnnnnnnnnnnnnnnnnnnnnnnnnnnnnnnnnnnnnnnnnnnnnnnnnnnnnnnnnnnnnnnnnnnnnnnnnnnnnnnnnnnnnnnnnnnnnnnnnnnnnnnnnnnnnnnnnnnnnnnnnnnnnnnnnnnnnnnnnnnnnnnnnnnnnnnnnnnnnnnnnnnnnnnnnnnnnnnnnnnnnnnnnnnnnnnnnnnnnnnnnnnnnnnnnnnnnnnnnnnnnnnnnnnnnnnnnnnnnnnnnnnnnnnnnnnnnnnnnnnnnnnnnnnnnnnnnnnnnnnnnnnnnnnnnnnnnnnnnnnnnnnnnnnnnnnnnnnnnnnnnnnnnnnnnnnnnnnnnnnnnnnnnnnnnnnnnnnnnnnnnnnnnnnnnnnnnnnnnnnnnnnnnnnnnnnnnnnnnnnnnnnnnnnnnnnnnnnnnnnnnnnnnnnnnnnnnnnnnnnnnnnnnnnnnnnnnnnnnnnnnnnnnnnnnnnnnnnnnnnnnnnnnnnnnnnnnnnnnnnnnnnnnnnnnnnnnnnnnnnnnnnnnnnnnnnnnnnnnnnnnnnnnnnnnnnnnnnnnnnnnnnnnnnnnnnnnnnnnnnnnnnnnnnnnnnnnnnnnnnnnnnnnnnnnnnnnnnnnnnnnnnnnnnnnnnnnnnnnnnnnnnnnnnnnnnnnnnnnnnnnnnnnnnnnnnnnnnnnnnnnnnnnnnnnnnnnnnnnnnnnnnnnnnnnnnnnnnnnnnnnnnnnnnnnnnnnnnnnnnnnnnnnnnnnnnnnnnnnnnnnnnnnnnnnnnnnnnnnnnnnnnnnnnnnnnnnnnnnnnnnnnnnnnnnnnnnnnnnnnnnnnnnnnnnnnnnnnnnnnnnnnnnnnnnnnnnnnnnnnnnnnnnnnnnnnnnnnnnnnnnnnnnnnnnnnnnnnnnnnnnnnnnnnnnnnnnnnnnnnnnnnnnnnnnnnnnnnnnnnnnnnnnnnnnnnnnnnnnnnnnnnnnnnnnnnnnnnnnnnnnnnnnnnnnnnnnnnnnnnnnnnnnnnnnnnnnnnnnnnnnnnnnnnnnnnnnnnnnnnnnnnnnnnnnnnnnnnnnnnnnnnnnnnnnnnnnnnnnnnnnnnnnnnnnnnnnnnnnnnnnnnnnnnnnnnnnnnnnnnnnnnnnnnnnnnnnnnnnnnnnnnnnnnnnnnnnnnnnnnnnnnnnnnnnnnnnnnnnnnnnnnnnnnnnnnnnnnnnnnnnnnnnnnnnnnnnnnnnnnnnnnnnnnnnnnnnnnnnnnnnnnnnnnnnnnnnnnnnnnnnnnnnnnnnnnnnnnnnnnnnnnnnnnnnnnnnnnnnnnnnnnnnnnnnnnnnnnnnnnnnnnnnnnnnnnnnnnnnnnnnnnnnnnnnnnnnnnnnnnnnnnnnnnnnnnnnnnnnnnnnnnnnnnnnnnnnnnnnnnnnnnnnnnnnnnnnnnnnnnnnnnnnnnnnnnnnnnnnnnnnnnnnnnnnnnnnnnnnnnnnnnnnnnnnnnnnnnnnnnnnnnnnnnnnnnnnnnnnnnnnnnnnnnnnnnnnnnnnnnnnnnnnnnnnnnnnnnnnnnnnnnnnnnnnnnnnnnnnnnnnnnnnnnnnnnnnnnnnnnnnnnnnnnnnnnnnnnnnnnnnnnnnnnnnnnnnnnnnnnnnnnnnnnnnnnnnnnnnnnnnnnnnnnnnnnnnnnnnnnnnnnnnnnnnnnnnnnnnnnnnnnnnnnnnnnnnnnnnnnnnnnnnnnnnnnnnnnnnnnnnnnnnnnnnnnnnnnnnnnnnnnnnnnnnnnnnnnnnnnnnnnnnnnnnnnnnnnnnnnnnnnnnnnnnnnnnnnnnnnnnnnnnnnnnnnnnnnnnnnnnnnnnnnnnnnnnnnnnnnnnnnnnnnnnnnnnnnnnnnnnnnnnnnnnnnnnnnnnnnnnnnnnnnnnnnnnnnnnnnnnnnnnnnnnnnnnnnnnnnnnnnnnnnnnnnnnnnnnnnnnnnnnnnnnnnnnnnnnnnnnnnnnnnnnnnnnnnnnnnnnnnnnnnnnnnnnnnnnnnnnnnnnnnnnnnnnnnnnnnnnnnnnnnnnnnnnnnnnnnnnnnnnnnnnnnnnnnnnnnnnnnnnnnnnnnnnnnnnnnnnnnnnnnnnnnnnnnnnnnnnnnnnnnnnnnnnnnnnnnnnnnnnnnnnnnnnnnnnnnnnnnnnnnnnnnnnnnnnnnnnnnnnnnnnnnnnnnnnnnnnnnnnnnnnnnnnnnnnnnnnnnnnnnnnnnnnnnnnnnnnnnnnnnnnnnnnnnnnnnnnnnnnnnnnnnnnnnnnnnnnnnnnnnnnnnnnnnnnnnnnnnnnnnnnnnnnnnnnnnnnnnnnnnnnnnnnnnnnnnnnnnnnnnnnnnnnnnnnnnnnnnnnnnnnnnnnnnnnnnnnnnnnnnnnnnnnnnnnnnnnnnnnnnnnnnnnnnnnnnnnnnnnnnnnnnnnnnnnnnnnnnnnnnnnnnnnnnnnnnnnnnnnnnnnnnnnnnnnnnnnnnnnnnnnnnnnnnnnnnnnnnnnnnnnnnnnnnnnnnnnnnnnnnnnnnnnnnnnnnnnnnnnnnnnnnnnnnnnnnnnnnnnnnnnnnnnnnnnnnnnnnnnnnnnnnnnnnnnnnnnnnnnnnnnnnnnnnnnnnnnnnnnnnnnnnnnnnnnnnnnnnnnnnnnnnnnnnnnnnnnnnnnnnnnnnnnnnnnnnnnnnnnnnnnnnnnnnnnnnnnnnnnnnnnnnnnnnnnnnnnnnnnnnnnnnnnnnnnnnnnnnnnnnnnnnnnnnnnnnnnnnnnnnnnnnnnnnnnnnnnnnnnnnnnnnnnnnnnnnnnnnnnnnnnnnnnnnnnnnnnnnnnnnnnnnnnnnnnnnnnnnnnnnnnnnnnnnnnnnnnnnnnnnnnnnnnnnnnnnnnnnnnnnnnnnnnnnnnnnnnnnnnnnnnnnnnnnnnnnnnnnnnnnnnnnnnnnnnnnnnnnnnnnnnnnnnnnnnnnnnnnnnnnnnnnnnnnnnnnnnnnnnnnnnnnnnnnnnnnnnnnnnnnnnnnnnnnnnnnnnnnnnnnnnnnnnnnnnnnnnnnnnnnnnnnnnnnnnnnnnnnnnnnnnnnnnnnnnnnnnnnnnnnnnnnnnnnnnnnnnnnnnnnnnnnnnnnnnnnnnnnnnnnnnnnnnnnnnnnnnnnnnnnnnnnnnnnnnnnnnnnnnnnnnnnnnnnnnnnnnnnnnnnnnnnnnnnnnnnnnnnnnnnnnnnnnnnnnnnnnnnnnnnnnnnnnnnnnnnnnnnnnnnnnnnnnnnnnnnnnnnnnnnnnnnnnnnnnnnnnnnnnnnnnnnnnnnnnnnnnnnnnnnnnnnnnnnnnnnnnnnnnnnnnnnnnnnnnnnnnnnnnnnnnnnnnnnnnnnnnnnnnnnnnnnnnnnnnnnnnnnnnnnnnnnnnnnnnnnnnnnnnnnnnnnnnnnnnnnnnnnnnnnnnnnnnnnnnnnnnnnnnnnnnnnnnnnnnnnnnnnnnnnnnnnnnnnnnnnnnnnnnnnnnnnnnnnnnnnnnnnnnnnnnnnnnnnnnnnnnnnnnnnnnnnnnnnnnnnnnnnnnnnnnnnnnnnnnnnnnnnnnnnnnnnnnnnnnnnnnnnnnnnnnnnnnnnnnnnnnnnnnnnnnnnnnnnnnnnnnnnnnnnnnnnnnnnnnnnnnnnnnnnnnnnnnnnnnnnnnnnnnnnnnnnnnnnnnnnnnnnnnnnnnnnnnnnnnnnnnnnnnnnnnnnnnnnnnnnnnnnnnnnnnnnnnnnnnnnnnnnnnnnnnnnnnnnnnnnnnnnnnnnnnnnnnnnnnnnnnnnnnnnnnnnnnnnnnnnnnnnnnnnnnnnnnnnnnnnnnnnnnnnnnnnnnnnnnnnnnnnnnnnnnnnnnnnnnnnnnnnnnnnnnnnnnnnnnnnnnnnnnnnnnnnnnnnnnnnnnnnnnnnnnnnnnnnnnnnnnnnnnnnnnnnnnnnnnnnnnnnnnnnnnnnnnnnnnnnnnnnnnnnnnnnnnnnnnnnnnnnnnnnnnnnnnnnnnnnnnnnnnnnnnnnnnnnnnnnnnnnnnnnnnnnnnnnnnnnnnnnnnnnnnnnnnnnnnnnnnnnnnnnnnnnnnnnnnnnnnnnnnnnnnnnnnnnnnnnnnnnnnnnnnnnnnnnnnnnnnnnnnnnnnnnnnnnnnnnnnnnnnnnnnnnnnnnnnnnnnnnnnnnnnnnnnnnnnnnnnnnnnnnnnnnnnnnnnnnnnnnnnnnnnnnnnnnnnnnnnnnnnnnnnnnnnnnnnnnnnnnnnnnnnnnnnnnnnnnnnnnnnnnnnnnnnnnnnnnnnnnnnnnnnnnnnnnnnnnnnnnnnnnnnnnnnnnnnnnnnnnnnnnnnnnnnnnnnnnnnnnnnnnnnnnnnnnnnnnnnnnnnnnnnnnnnnnnnnnnnnnnnnnnnnnnnnnnnnnnnnnnnnnnnnnnnnnnnnnnnnnnnnnnnnnnnnnnnnnnnnnnnnnnnnnnnnnnnnnnnnnnnnnnnnnnnnnnnnnnnnnnnnnnnnnnnnnnnnnnnnnnnnnnnnnnnnnnnnnnnnnnnnnnnnnnnnnnnnnnnnnnnnnnnnnnnnnnnnnnnnnnnnnnnnnnnnnnnnnnnnnnnnnnnnnnnnnnnnnnnnnnnnnnnnnnnnnnnnnnnnnnnnnnnnnnnnnnnnnnnnnnnnnnnnnnnnnnnnnnnnnnnnnnnnnnnnnnnnnnnnnnnnnnnnnnnnnnnnnnnnnnnnnnnnnnnnnnnnnnnnnnnnnnnnnnnnnnnnnnnnnnnnnnnnnnnnnnnnnnnnnnnnnnnnnnnnnnnnnnnnnnnnnnnnnnnnnnnnnnnnnnnnnnnnnnnnnnnnnnnnnnnnnnnnnnnnnnnnnnnnnnnnnnnnnnnnnnnnnnnnnnnnnnnnnnnnnnnnnnnnnnnnnnnnnnnnnnnnnnnnnnnnnnnnnnnnnnnnnnnnnnnnnnnnnnnnnnnnnnnnnnnnnnnnnnnnnnnnnnnnnnnnnnnnnnnnnnnnnnnnnnnnnnnnnnnnnnnnnnnnnnnnnnnnnnnnnnnnnnnnnnnnnnnnnnnnnnnnnnnnnnnnnnnnnnnnnnnnnnnnnnnnnnnnnnnnnnnnnnnnnnnnnnnnnnnnnnnnnnnnnnnnnnnnnnnnnnnnnnnnnnnnnnnnnnnnnnnnnnnnnnnnnnnnnnnnnnnnnnnnnnnnnnnnnnnnnnnnnnnnnnnnnnnnnnnnnnnnnnnnnnnnnnnnnnnnnnnnnnnnnnnnnnnnnnnnnnnnnnnnnnnnnnnnnnnnnnnnnnnnnnnnnnnnnnnnnnnnnnnnnnnnnnnnnnnnnnnnnnnnnnnnnnnnnnnnnnnnnnnnnnnnnnnnnnnnnnnnnnnnnnnnnnnnnnnnnnnnnnnnnnnnnnnnnnnnnnnnnnnnnnnnnnnnnnnnnnnnnnnnnnnnnnnnnnnnnnnnnnnnnnnnnnnnnnnnnnnnnnnnnnnnnnnnnnnnnnnnnnnnnnnnnnnnnnnnnnnnnnnnnnnnnnnnnnnnnnnnnnnnnnnnnnnnnnnnnnnnnnnnnnnnnnnnnnnnnnnnnnnnnnnnnnnnnnnnnnnnnnnnnnnnnnnnnnnnnnnnnnnnnnnnnnnnnnnnnnnnnnnnnnnnnnnnnnnnnnnnnnnnnnnnnnnnnnnnnnnnnnnnnnnnnnnnnnnnnnnnnnnnnnnnnnnnnnnnnnnnnnnnnnnnnnnnnnnnnnnnnnnnnnnnnnnnnnnnnnnnnnnnnnnnnnnnnnnnnnnnnnnnnnnnnnnnnnnnnnnnnnnnnnnnnnnnnnnnnnnnnnnnnnnnnnnnnnnnnnnnnnnnnnnnnnnnnnnnnnnnnnnnnnnnnnnnnnnnnnnnnnnnnnnnnnnnnnnnnnnnnnnnnnnnnnnnnnnnnnnnnnnnnnnnnnnnnnnnnnnnnnnnnnnnnnnnnnnnnnnnnnnnnnnnnnnnnnnnnnnnnnnnnnnnnnnnnnnnnnnnnnnnnnnnnnnnnnnnnnnnnnnnnnnnnnnnnnnnnnnnnnnnnnnnnnnnnnnnnnnnnnnnnnnnnnnnnnnnnnnnnnnnnnnnnnnnnnnnnnnnnnnnnnnnnnnnnnnnnnnnnnnnnnnnnnnnnnnnnnnnnnnnnnnnnnnnnnnnnnnnnnnnnnnnnnnnnnnnnnnnnnnnnnnnnnnnnnnnnnnnnnnnnnnnnnnnnnnnnnnnnnnnnnnnnnnnnnnnnnnnnnnnnnnnnnnnnnnnnnnnnnnnnnnnnnnnnnnnnnnnnnnnnnnnnnnnnnnnnnnnnnnnnnnnnnnnnnnnnnnnnnnnnnnnnnnnnnnnnnnnnnnnnnnnnnnnnnnnnnnnnnnnnnnnnnnnnnnnnnnnnnnnnnnnnnnnnnnnnnnnnnnnnnnnnnnnnnnnnnnnnnnnnnnnnnnnnnnnnnnnnnnnnnnnnnnnnnnnnnnnnnnnnnnnnnnnnnnnnnnnnnnnnnnnnnnnnnnnnnnnnnnnnnnnnnnnnnnnnnnnnnnnnnnnnnnnnnnnnnnnnnnnnnnnnnnnnnnnnnnnnnnnnnnnnnnnnnnnnnnnnnnnnnnnnnnnnnnnnnnnnnnnnnnnnnnnnnnnnnnnnnnnnnnnnnnnnnnnnnnnnnnnnnnnnnnnnnnnnnnnnnnnnnnnnnnnnnnnnnnnnnnnnnnnnnnnnnnnnnnnnnnnnnnnnnnnnnnnnnnnnnnnnnnnnnnnnnnnnnnnnnnnnnnnnnnnnnnnnnnnnnnnnnnnnnnnnnnnnnnnnnnnnnnnnnnnnnnnnnnnnnnnnnnnnnnnnnnnnnnnnnnnnnnnnnnnnnnnnnnnnnnnnnnnnnnnnnnnnnnnnnnnnnnnnnnnnnnnnnnnnnnnnnnnnnnnnnnnnnnnnnnnnnnnnnnnnnnnnnnnnnnnnnnnnnnnnnnnnnnnnnnnnnnnnnnnnnnnnnnnnnnnnnnnnnnnnnnnnnnnnnnnnnnnnnnnnnnnnnnnnnnnnnnnnnnnnnnnnnnnnnnnnnnnnnnnnnnnnnnnnnnnnnnnnnnnnnnnnnnnnnnnnnnnnnnnnnnnnnnnnnnnnnnnnnnnnnnnnnnnnnnnnnnnnnnnnnnnnnnnnnnnnnnnnnnnnnnnnnnnnnnnnnnnnnnnnnnnnnnnnnnnnnnnnnnnnnnnnnnnnnnnnnnnnnnnnnnnnnnnnnnnnnnnnnnnnnnnnnnnnnnnnnnnnnnnnnnnnnnnnnnnnnnnnnnnnnnnnnnnnnnnnnnnnnnnnnnnnnnnnnnnnnnnnnnnnnnnnnnnnnnnnnnnnnnnnnnnnnnnnnnnnnnnnnnnnnnnnnnnnnnnnnnnnnnnnnnnnnnnnnnnnnnnnnnnnnnnnnnnnnnnnnnnnnnnnnnnnnnnnnnnnnnnnnnnnnnnnnnnnnnnnnnnnnnnnnnnnnnnnnnnnnnnnnnnnnnnnnnnnnnnnnnnnnnnnnnnnnnnnnnnnnnnnnnnnnnnnnnnnnnnnnnnnnnnnnnnnnnnnnnnnnnnnnnnnnnnnnnnnnnnnnnnnnnnnnnnnnnnnnnnnnnnnnnnnnnnnnnnnnnnnnnnnnnnnnnnnnnnnnnnnnnnnnnnnnnnnnnnnnnnnnnnnnnnnnnnnnnnnnnnnnnnnnnnnnnnnnnnnnnnnnnnnnnnnnnnnnnnnnnnnnnnnnnnnnnnnnnnnnnnnnnnnnnnnnnnnnnnnnnnnnnnnnnnnnnnnnnnnnnnnnnnnnnnnnnnnnnnnnnnnnnnnnnnnnnnnnnnnnnnnnnnnnnnnnnnnnnnnnnnnnnnnnnnnnnnnnnnnnnnnnnnnnnnnnnnnnnnnnnnnnnnnnnnnnnnnnnnnnnnnnnnnnnnnnnnnnnnnnnnnnnnnnnnnnnnnnnnnnnnnnnnnnnnnnnnnnnnnnnnnnnnnnnnnnnnnnnnnnnnnnnnnnnnnnnnnnnnnnnnnnnnnnnnnnnnnnnnnnnnnnnnnnnnnnnnnnnnnnnnnnnnnnnnnnnnnnnnnnnnnnnnnnnnnnnnnnnnnnnnnnnnnnnnnnnnnnnnnnnnnnnnnnnnnnnnnnnnnnnnnnnnnnnnnnnnnnnnnnnnnnnnnnnnnnnnnnnnnnnnnnnnnnnnnnnnnnnnnnnnnnnnnnnnnnnnnnnnnnnnnnnnnnnnnnnnnnnnnnnnnnnnnnnnnnnnnnnnnnnnnnnnnnnnnnnnnnnnnnnnnnnnnnnnnnnnnnnnnnnnnnnnnnnnnnnnnnnnnnnnnnnnnnnnnnnnnnnnnnnnnnnnnnnnnnnnnnnnnnnnnnnnnnnnnnnnnnnnnnnnnnnnnnnnnnnnnnnnnnnnnnnnnnnnnnnnnnnnnnnnnnnnnnnnnnnnnnnnnnnnnnnnnnnnnnnnnnnnnnnnnnnnnnnnnnnnnnnnnnnnnnnnnnnnnnnnnnnnnnnnnnnnnnnnnnnnnnnnnnnnnnnnnnnnnnnnnnnnnnnnnnnnnnnnnnnnnnnnnnnnnnnnnnnnnnnnnnnnnnnnnnnnnnnnnnnnnnnnnnnnnnnnnnnnnnnnnnnnnnnnnnnnnnnnnnnnnnnnnnnnnnnnnnnnnnnnnnnnnnnnnnnnnnnnnnnnnnnnnnnnnnnnnnnnnnnnnnnnnnnnnnnnnnnnnnnnnnnnnnnnnnnnnnnnnnnnnnnnnnnnnnnnnnnnnnnnnnnnnnnnnnnnnnnnnnnnnnnnnnnnnnnnnnnnnnnnnnnnnnnnnnnnnnnnnnnnnnnnnnnnnnnnnnnnnnnnnnnnnnnnnnnnnnnnnnnnnnnnnnnnnnnnnnnnnnnnnnnnnnnnnnnnnnnnnnnnnnnnnnnnnnnnnnnnnnnnnnnnnnnnnnnnnnnnnnnnnnnnnnnnnnnnnnnnnnnnnnnnnnnnnnnnnnnnnnnnnnnnnnnnnnnnnnnnnnnnnnnnnnnnnnnnnnnnnnnnnnnnnnnnnnnnnnnnnnnnnnnnnnnnnnnnnnnnnnnnnnnnnnnnnnnnnnnnnnnnnnnnnnnnnnnnnnnnnnnnnnnnnnnnnnnnnnnnnnnnnnnnnnnnnnnnnnnnnnnnnnnnnnnnnnnnnnnnnnnnnnnnnnnnnnnnnnnnnnnnnnnnnnnnnnnnnnnnnnnnnnnnnnnnnnnnnnnnnnnnnnnnnnnnnnnnnnnnnnnnnnnnnnnnnnnnnnnnnnnnnnnnnnnnnnnnnnnnnnnnnnnnnnnnnnnnnnnnnnnnnnnnnnnnnnnnnnnnnnnnnnnnnnnnnnnnnnnnnnnnnnnnnnnnnnnnnnnnnnnnnnnnnnnnnnnnnnnnnnnnnnnnnnnnnnnnnnnnnnnnnnnnnnnnnnnnnnnnnnnnnnnnnnnnnnnnnnnnnnnnnnnnnnnnnnnnnnnnnnnnnnnnnnnnnnnnnnnnnnnnnnnnnnnnnnnnnnnnnnnnnnnnnnnnnnnnnnnnnnnnnnnnnnnnnnnnnnnnnnnnnnnnnnnnnnnnnnnnnnnnnnnnnnnnnnnnnnnnnnnnnnnnnnnnnnnnnnnnnnnnnnnnnnnnnnnnnnnnnnnnnnnnnnnnnnnnnnnnnnnnnnnnnnnnnnnnnnnnnnnnnnnnnnnnnnnnnnnnnnnnnnnnnnnnnnnnnnnnnnnnnnnnnnnnnnnnnnnnnnnnnnnnnnnnnnnnnnnnnnnnnnnnnnnnnnnnnnnnnnnnnnnnnnnnnnnnnnnnnnnnnnnnnnnnnnnnnnnnnnnnnnnnnnnnnnnnnnnnnnnnnnnnnnnnnnnnnnnnnnnnnnnnnnnnnnnnnnnnnnnnnnnnnnnnnnnnnnnnnnnnnnnnnnnnnnnnnnnnnnnnnnnnnnnnnnnnnnnnnnnnnnnnnnnnnnnnnnnnnnnnnnnnnnnnnnnnnnnnnnnnnnnnnnnnnnnnnnnnnnnnnnnnnnnnnnnnnnnnnnnnnnnnnnnnnnnnnnnnnnnnnnnnnnnnnnnnnnnnnnnnnnnnnnnnnnnnnnnnnnnnnnnnnnnnnnnnnnnnnnnnnnnnnnnnnnnnnnnnnnnnnnnnnnnnnnnnnnnnnnnnnnnnnnnnnnnnnnnnnnnnnnnnnnnnnnnnnnnnnnnnnnnnnnnnnnnnnnnnnnnnnnnnnnnnnnnnnnnnnnnnnnnnnnnnnnnnnnnnnnnnnnnnnnnnnnnnnnnnnnnnnnnnnnnnnnnnnnnnnnnnnnnnnnnnnnnnnnnnnnnnnnnnnnnnnnnnnnnnnnnnnnnnnnnnnnnnnnnnnnnnnnnnnnnnnnnnnnnnnnnnnnnnnnnnnnnnnnnnnnnnnnnnnnnnnnnnnnnnnnnnnnnnnnnnnnnnnnnnnnnnnnnnnnnnnnnnnnnnnnnnnnnnnnnnnnnnnnnnnnnnnnnnnnnnnnnnnnnnnnnnnnnnnnnnnnnnnnnnnnnnnnnnnnnnnnnnnnnnnnnnnnnnnnnnnnnnnnnnnnnnnnnnnnnnnnnnnnnnnnnnnnnnnnnnnnnnnnnnnnnnnnnnnnnnnnnnnnnnnnnnnnnnnnnnnnnnnnnnnnnnnnnnnnnnnnnnnnnnnnnnnnnnnnnnnnnnnnnnnnnnnnnnnnnnnnnnnnnnnnnnnnnnnnnnnnnnnnnnnnnnnnnnnnnnnnnnnnnnnnnnnnnnnnnnnnnnnnnnnnnnnnnnnnnnnnnnnnnnnnnnnnnnnnnnnnnnnnnnnnnnnnnnnnnnnnnnnnnnnnnnnnnnnnnnnnnnnnnnnnnnnnnnnnnnnnnnnnnnnnnnnnnnnnnnnnnnnnnnnnnnnnnnnnnnnnnnnnnnnnnnnnnnnnnnnnnnnnnnnnnnnnnnnnnnnnnnnnnnnnnnnnnnnnnnnnnnnnnnnnnnnnnnnnnnnnnnnnnnnnnnnnnnnnnnnnnnnnnnnnnnnnnnnnnnnnnnnnnnnnnnnnnnnnnnnnnnnnnnnnnnnnnnnnnnnnnnnnnnnnnnnnnnnnnnnnnnnnnnnnnnnnnnnnnnnnnnnnnnnnnnnnnnnnnnnnnnnnnnnnnnnnnnnnnnnnnnnnnnnnnnnnnnnnnnnnnnnnnnnnnnnnnnnnnnnnnnnnnnnnnnnnnnnnnnnnnnnnnnnnnnnnnnnnnnnnnnnnnnnnnnnnnnnnnnnnnnnnnnnnnnnnnnnnnnnnnnnnnnnnnnnnnnnnnnnnnnnnnnnnnnnnnnnnnnnnnnnnnnnnnnnnnnnnnnnnnnnnnnnnnnnnnnnnnnnnnnnnnnnnnnnnnnnnnnnnnnnnnnnnnnnnnnnnnnnnnnnnnnnnnnnnnnnnnnnnnnnnnnnnnnnnnnnnnnnnnnnnnnnnnnnnnnnnnnnnnnnnnnnnnnnnnnnnnnnnnnnnnnnnnnnnnnnnnnnnnnnnnnnnnnnnnnnnnnnnnnnnnnnnnnnnnnnnnnnnnnnnnnnnnnnnnnnnnnnnnnnnnnnnnnnnnnnnnnnnnnnnnnnnnnnnnnnnnnnnnnnnnnnnnnnnnnnnnnnnnnnnnnnnnnnnnnnnnnnnnnnnnnnnnnnnnnnnnnnnnnnnnnnnnnnnnnnnnnnnnnnnnnnnnnnnnnnnnnnnnnnnnnnnnnnnnnnnnnnnnnnnnnnnnnnnnnnnnnnnnnnnnnnnnnnnnnnnnnnnnnnnnnnnnnnnnnnnnnnnnnnnnnnnnnnnnnnnnnnnnnnnnnnnnnnnnnnnnnnnnnnnnnnnnnnnnnnnnnnnnnnnnnnnnnnnnnnnnnnnnnnnnnnnnnnnnnnnnnnnnnnnnnnnnnnnnnnnnnnnnnnnnnnnnnnnnnnnnnnnnnnnnnnnnnnnnnnnnnnnnnnnnnnnnnnnnnnnnnnnnnnnnnnnnnnnnnnnnnnnnnnnnnnnnnnnnnnnnnnnnnnnnnnnnnnnnnnnnnnnnnnnnnnnnnnnnnnnnnnnnnnnnnnnnnnnnnnnnnnnnnnnnnnnnnnnnnnnnnnnnnnnnnnnnnnnnnnnnnnnnnnnnnnnnnnnnnnnnnnnnnnnnnnnnnnnnnnnnnnnnnnnnnnnnnnnnnnnnnnnnnnnnnnnnnnnnnnnnnnnnnnnnnnnnnnnnnnnnnnnnnnnnnnnnnnnnnnnnnnnnnnnnnnnnnnnnnnnnnnnnnnnnnnnnnnnnnnnnnnnnnnnnnnnnnnnnnnnnnnnnnnnnnnnnnnnnnnnnnnnnnnnnnnnnnnnnnnnnnnnnnnnnnnnnnnnnnnnnnnnnnnnnnnnnnnnnnnnnnnnnnnnnnnnnnnnnnnnnnnnnnnnnnnnnnnnnnnnnnnnnnnnnnnnnnnnnnnnnnnnnnnnnnnnnnnnnnnnnnnnnnnnnnnnnnnnnnnnnnnnnnnnnnnnnnnnnnnnnnnnnnnnnnnnnnnnnnnnnnnnnnnnnnnnnnnnnnnnnnnnnnnnnnnnnnnnnnnnnnnnnnnnnnnnnnnnnnnnnnnnnnnnnnnnnnnnnnnnnnnnnnnnnnnnnnnnnnnnnnnnnnnnnnnnnnnnnnnnnnnnnnnnnnnnnnnnnnnnnnnnnnnnnnnnnnnnnnnnnnnnnnnnnnnnnnnnnnnnnnnnnnnnnnnnnnnnnnnnnnnnnnnnnnnnnnnnnnnnnnnnnnnnnnnnnnnnnnnnnnnnnnnnnnnnnnnnnnnnnnnnnnnnnnnnnnnnnnnnnnnnnnnnnnnnnnnnnnnnnnnnnnnnnnnnnnnnnnnnnnnnnnnnnnnnnnnnnnnnnnnnnnnnnnnnnnnnnnnnnnnnnnnnnnnnnnnnnnnnnnnnnnnnnnnnnnnnnnnnnnnnnnnnnnnnnnnnnnnnnnnnnnnnnnnnnnnnnnnnnnnnnnnnnnnnnnnnnnnnnnnnnnnnnnnnnnnnnnnnnnnnnnnnnnnnnnnnnnnnnnnnnnnnnnnnnnnnnnnnnnnnnnnnnnnnnnnnnnnnnnnnnnnnnnnnnnnnnnnnnnnnnnnnnnnnnnnnnnnnnnnnnnnnnnnnnnnnnnnnnnnnnnnnnnnnnnnnnnnnnnnnnnnnnnnnnnnnnnnnnnnnnnnnnnnnnnnnnnnnnnnnnnnnnnnnnnnnnnnnnnnnnnnnnnnnnnnnnnnnnnnnnnnnnnnnnnnnnnnnnnnnnnnnnnnnnnnnnnnnnnnnnnnnnnnnnnnnnnnnnnnnnnnnnnnnnnnnnnnnnnnnnnnnnnnnnnnnnnnnnnnnnnnnnnnnnnnnnnnnnnnnnnnnnnnnnnnnnnnnnnnnnnnnnnnnnnnnnnnnnnnnnnnnnnnnnnnnnnnnnnnnnnnnnnnnnnnnnnnnnnnnnnnnnnnnnnnnnnnnnnnnnnnnnnnnnnnnnnnnnnnnnnnnnnnnnnnnnnnnnnnnnnnnnnnnnnnnnnnnnnnnnnnnnnnnnnnnnnnnnnnnnnnnnnnnnnnnnnnnnnnnnnnnnnnnnnnnnnnnnnnnnnnnnnnnnnnnnnnnnnnnnnnnnnnnnnnnnnnnnnnnnnnnnnnnnnnnnnnnnnnnnnnnnnnnnnnnnnnnnnnnnnnnnnnnnnnnnnnnnnnnnnnnnnnnnnnnnnnnnnnnnnnnnnnnnnnnnnnnnnnnnnnnnnnnnnnnnnnnnnnnnnnnnnnnnnnnnnnnnnnnnnnnnnnnnnnnnnnnnnnnnnnnnnnnnnnnnnnnnnnnnnnnnnnnnnnnnnnnnnnnnnnnnnnnnnnnnnnnnnnnnnnnnnnnnnnnnnnnnnnnnnnnnnnnnnnnnnnnnnnnnnnnnnnnnnnnnnnnnnnnnnnnnnnnnnnnnnnnnnnnnnnnnnnnnnnnnnnnnnnnnnnnnnnnnnnnnnnnnnnnnnnnnnnnnnnnnnnnnnnnnnnnnnnnnnnnnnnnnnnnnnnnnnnnnnnnnnnnnnnnnnnnnnnnnnnnnnnnnnnnnnnnnnnnnnnnnnnnnnnnnnnnnnnnnnnnnnnnnnnnnnnnnnnnnnnnnnnnnnnnnnnnnnnnnnnnnnnnnnnnnnnnnnnnnnnnnnnnnnnnnnnnnnnnnnnnnnnnnnnnnnnnnnnnnnnnnnnnnnnnnnnnnnnnnnnnnnnnnnnnnnnnnnnnnnnnnnnnnnnnnnnnnnnnnnnnnnnnnnnnnnnnnnnnnnnnnnnnnnnnnnnnnnnnnnnnnnnnnnnnnnnnnnnnnnnnnnnnnnnnnnnnnnnnnnnnnnnnnnnnnnnnnnnnnnnnnnnnnnnnnnnnnnnnnnnnnnnnnnnnnnnnnnnnnnnnnnnnnnnnnnnnnnnnnnnnnnnnnnnnnnnnnnnnnnnnnnnnnnnnnnnnnnnnnnnnnnnnnnnnnnnnnnnnnnnnnnnnnnnnnnnnnnnnnnnnnnnnnnnnnnnnnnnnnnnnnnnnnnnnnnnnnnnnnnnnnnnnnnnnnnnnnnnnnnnnnnnnnnnnnnnnnnnnnnnnnnnnnnnnnnnnnnnnnnnnnnnnnnnnnnnnnnnnnnnnnnnnnnnnnnnnnnnnnnnnnnnnnnnnnnnnnnnnnnnnnnnnnnnnnnnnnnnnnnnnnnnnnnnnnnnnnnnnnnnnnnnnnnnnnnnnnnnnnnnnnnnnnnnnnnnnnnnnnnnnnnnnnnnnnnnnnnnnnnnnnnnnnnnnnnnnnnnnnnnnnnnnnnnnnnnnnnnnnnnnnnnnnnnnnnnnnnnnnnnnnnnnnnnnnnnnnnnnnnnnnnnnnnnnnnnnnnnnnnnnnnnnnnnnnnnnnnnnnnnnnnnnnnnnnnnnnnnnnnnnnnnnnnnnnnnnnnnnnnnnnnnnnnnnnnnnnnnnnnnnnnnnnnnnnnnnnnnnnnnnnnnnnnnnnnnnnnnnnnnnnnnnnnnnnnnnnnnnnnnnnnnnnnnnnnnnnnnnnnnnnnnnnnnnnnnnnnnnnnnnnnnnnnnnnnnnnnnnnnnnnnnnnnnnnnnnnnnnnnnnnnnnnnnnnnnnnnnnnnnnnnnnnnnnnnnnnnnnnnnnnnnnnnnnnnnnnnnnnnnnnnnnnnnnnnnnnnnnnnnnnnnnnnnnnnnnnnnnnnnnnnnnnnnnnnnnnnnnnnnnnnnnnnnnnnnnnnnnnnnnnnnnnnnnnnnnnnnnnnnnnnnnnnnnnnnnnnnnnnnnnnnnnnnnnnnnnnnnnnnnnnnnnnnnnnnnnnnnnnnnnnnnnnnnnnnnnnnnnnnnnnnnnnnnnnnnnnnnnnnnnnnnnnnnnnnnnnnnnnnnnnnnnnnnnnnnnnnnnnnnnnnnnnnnnnnnnnnnnnnnnnnnnnnnnnnnnnnnnnnnnnnnnnnnnnnnnnnnnnnnnnnnnnnnnnnnnnnnnnnnnnnnnnnnnnnnnnnnnnnnnnnnnnnnnnnnnnnnnnnnnnnnnnnnnnnnnnnnnnnnnnnnnnnnnnnnnnnnnnnnnnnnnnnnnnnnnnnnnnnnnnnnnnnnnnnnnnnnnnnnnnnnnnnnnnnnnnnnnnnnnnnnnnnnnnnnnnnnnnnnnnnnnnnnnnnnnnnnnnnnnnnnnnnnnnnnnnnnnnnnnnnnnnnnnnnnnnnnnnnnnnnnnnnnnnnnnnnnnnnnnnnnnnnnnnnnnnnnnnnnnnnnnnnnnnnnnnnnnnnnnnnnnnnnnnnnnnnnnnnnnnnnnnnnnnnnnnnnnnnnnnnnnnnnnnnnnnnnnnnnnnnnnnnnnnnnnnnnnnnnnnnnnnnnnnnnnnnnnnnnnnnnnnnnnnnnnnnnnnnnnnnnnnnnnnnnnnnnnnnnnnnnnnnnnnnnnnnnnnnnnnnnnnnnnnnnnnnnnnnnnnnnnnnnnnnnnnnnnnnnnnnnnnnnnnnnnnnnnnnnnnnnnnnnnnnnnnnnnnnnnnnnnnnnnnnnnnnnnnnnnnnnnnnnnnnnnnnnnnnnnnnnnnnnnnnnnnnnnnnnnnnnnnnnnnnnnnnnnnnnnnnnnnnnnnnnnnnnnnnnnnnnnnnnnnnnnnnnnnnnnnnnnnnnnnnnnnnnnnnnnnnnnnnnnnnnnnnnnnnnnnnnnnnnnnnnnnnnnnnnnnnnnnnnnnnnnnnnnnnnnnnnnnnnnnnnnnnnnnnnnnnnnnnnnnnnnnnnnnnnnnnnnnnnnnnnnnnnnnnnnnnnnnnnnnnnnnnnnnnnnnnnnnnnnnnnnnnnnnnnnnnnnnnnnnnnnnnnnnnnnnnnnnnnnnnnnnnnnnnnnnnnnnnnnnnnnnnnnnnnnnnnnnnnnnnnnnnnnnnnnnnnnnnnnnnnnnnnnnnnnnnnnnnnnnnnnnnnnnnnnnnnnnnnnnnnnnnnnnnnnnnnnnnnnnnnnnnnnnnnnnnnnnnnnnnnnnnnnnnnnnnnnnnnnnnnnnnnnnnnnnnnnnnnnnnnnnnnnnnnnnnnnnnnnnnnnnnnnnnnnnnnnnnnnnnnnnnnnnnnnnnnnnnnnnnnnnnnnnnnnnnnnnnnnnnnnnnnnnnnnnnnnnnnnnnnnnnnnnnnnnnnnnnnnnnnnnnnnnnnnnnnnnnnnnnnnnnnnnnnnnnnnnnnnnnnnnnnnnnnnnnnnnnnnnnnnnnnnnnnnnnnnnnnnnnnnnnnnnnnnnnnnnnnnnnnnnnnnnnnnnnnnnnnnnnnnnnnnnnnnnnnnnnnnnnnnnnnnnnnnnnnnnnnnnnnnnnnnnnnnnnnnnnnnnnnnnnnnnnnnnnnnnnnnnnnnnnnnnnnnnnnnnnnnnnnnnnnnnnnnnnnnnnnnnnnnnnnnnnnnnnnnnnnnnnnnnnnnnnnnnnnnnnnnnnnnnnnnnnnnnnnnnnnnnnnnnnnnnnnnnnnnnnnnnnnnnnnnnnnnnnnnnnnnnnnnnnnnnnnnnnnnnnnnnnnnnnnnnnnnnnnnnnnnnnnnnnnnnnnnnnnnnnnnnnnnnnnnnnnnnnnnnnnnnnnnnnnnnnnnnnnnnnnnnnnnnnnnnnnnnnnnnnnnnnnnnnnnnnnnnnnnnnnnnnnnnnnnnnnnnnnnnnnnnnnnnnnnnnnnnnnnnnnnnnnnnnnnnnnnnnnnnnnnnnnnnnnnnnnnnnnnnnnnnnnnnnnnnnnnnnnnnnnnnnnnnnnnnnnnnnnnnnnnnnnnnnnnnnnnnnnnnnnnnnnnnnnnnnnnnnnnnnnnnnnnnnnnnnnnnnnnnnnnnnnnnnnnnnnnnnnnnnnnnnnnnnnnnnnnnnnnnnnnnnnnnnnnnnnnnnnnnnnnnnnnnnnnnnnnnnnnnnnnnnnnnnnnnnnnnnnnnnnnnnnnnnnnnnnnnnnnnnnnnnnnnnnnnnnnnnnnnnnnnnnnnnnnnnnnnnnnnnnnnnnnnnnnnnnnnnnnnnnnnnnnnnnnnnnnnnnnnnnnnnnnnnnnnnnnnnnnnnnnnnnnnnnnnnnnnnnnnnnnnnnnnnnnnnnnnnnnnnnnnnnnnnnnnnnnnnnnnnnnnnnnnnnnnnnnnnnnnnnnnnnnnnnnnnnnnnnnnnnnnnnnnnnnnnnnnnnnnnnnnnnnnnnnnnnnnnnnnnnnnnnnnnnnnnnnnnnnnnnnnnnnnnnnnnnnnnnnnnnnnnnnnnnnnnnnnnnnnnnnnnnnnnnnnnnnnnnnnnnnnnnnnnnnnnnnnnnnnnnnnnnnnnnnnnnnnnnnnnnnnnnnnnnnnnnnnnnnnnnnnnnnnnnnnnnnnnnnnnnnnnnnnnnnnnnnnnnnnnnnnnnnnnnnnnnnnnnnnnnnnnnnnnnnnnnnnnnnnnnnnnnnnnnnnnnnnnnnnnnnnnnnnnnnnnnnnnnnnnnnnnnnnnnnnnnnnnnnnnnnnnnnnnnnnnnnnnnnnnnnnnnnnnnnnnnnnnnnnnnnnnnnnnnnnnnnnnnnnnnnnnnnnnnnnnnnnnnnnnnnnnnnnnnnnnnnnnnnnnnnnnnnnnnnnnnnnnnnnnnnnnnnnnnnnnnnnnnnnnnnnnnnnnnnnnnnnnnnnnnnnnnnnnnnnnnnnnnnnnnnnnnnnnnnnnnnnnnnnnnnnnnnnnnnnnnnnnnnnnnnnnnnnnnnnnnnnnnnnnnnnnnnnnnnnnnnnnnnnnnnnnnnnnnnnnnnnnnnnnnnnnnnnnnnnnnnnnnnnnnnnnnnnnnnnnnnnnnnnnnnnnnnnnnnnnnnnnnnnnnnnnnnnnnnnnnnnnnnnnnnnnnnnnnnnnnnnnnnnnnnnnnnnnnnnnnnnnnnnnnnnnnnnnnnnnnnnnnnnnnnnnnnnnnnnnnnnnnnnnnnnnnnnnnnnnnnnnnnnnnnnnnnnnnnnnnnnnnnnnnnnnnnnnnnnnnnnnnnnnnnnnnnnnnnnnnnnnnnnnnnnnnnnnnnnnnnnnnnnnnnnnnnnnnnnnnnnnnnnnnnnnnnnnnnnnnnnnnnnnnnnnnnnnnnnnnnnnnnnnnnnnnnnnnnnnnnnnnnnnnnnnnnnnnnnnnnnnnnnnnnnnnnnnnnnnnnnnnnnnnnnnnnnnnnnnnnnnnnnnnnnnnnnnnnnnnnnnnnnnnnnnnnnnnnnnnnnnnnnnnnnnnnnnnnnnnnnnnnnnnnnnnnnnnnnnnnnnnnnnnnnnnnnnnnnnnnnnnnnnnnnnnnnnnnnnnnnnnnnnnnnnnnnnnnnnnnnnnnnnnnnnnnnnnnnnnnnnnnnnnnnnnnnnnnnnnnnnnnnnnnnnnnnnnnnnnnnnnnnnnnnnnnnnnnnnnnnnnnnnnnnnnnnnnnnnnnnnnnnnnnnnnnnnnnnnnnnnnnnnnnnnnnnnnnnnnnnnnnnnnnnnnnnnnnnnnnnnnnnnnnnnnnnnnnnnnnnnnnnnnnnnnnnnnnnnnnnnnnnnnnnnnnnnnnnnnnnnnnnnnnnnnnnnnnnnnnnnnnnnnnnnnnnnnnnnnnnnnnnnnnnnnnnnnnnnnnnnnnnnnnnnnnnnnnnnnnnnnnnnnnnnnnnnnnnnnnnnnnnnnnnnnnnnnnnnnnnnnnnnnnnnnnnnnnnnnnnnnnnnnnnnnnnnnnnnnnnnnnnnnnnnnnnnnnnnnnnnnnnnnnnnnnnnnnnnnnnnnnnnnnnnnnnnnnnnnnnnnnnnnnnnnnnnnnnnnnnnnnnnnnnnnnnnnnnnnnnnnnnnnnnnnnnnnnnnnnnnnnnnnnnnnnnnnnnnnnnnnnnnnnnnnnnnnnnnnnnnnnnnnnnnnnnnnnnnnnnnnnnnnnnnnnnnnnnnnnnnnnnnnnnnnnnnnnnnnnnnnnnnnnnnnnnnnnnnnnnnnnnnnnnnnnnnnnnnnnnnnnnnnnnnnnnnnnnnnnnnnnnnnnnnnnnnnnnnnnnnnnnnnnnnnnnnnnnnnnnnnnnnnnnnnnnnnnnnnnnnnnnnnnnnnnnnnnnnnnnnnnnnnnnnnnnnnnnnnnnnnnnnnnnnnnnnnnnnnnnnnnnnnnnnnnnnnnnnnnnnnnnnnnnnnnnnnnnnnnnnnnnnnnnnnnnnnnnnnnnnnnnnnnnnnnnnnnnnnnnnnnnnnnnnnnnnnnnnnnnnnnnnnnnnnnnnnnnnnnnnnnnnnnnnnnnnnnnnnnnnnnnnnnnnnnnnnnnnnnnnnnnnnnnnnnnnnnnnnnnnnnnnnnnnnnnnnnnnnnnnnnnnnnnnnnnnnnnnnnnnnnnnnnnnnnnnnnnnnnnnnnnnnnnnnnnnnnnnnnnnnnnnnnnnnnnnnnnnnnnnnnnnnnnnnnnnnnnnnnnnnnnnnnnnnnnnnnnnnnnnnnnnnnnnnnnnnnnnnnnnnnnnnnnnnnnnnnnnnnnnnnnnnnnnnnnnnnnnnnnnnnnnnnnnnnnnnnnnnnnnnnnnnnnnnnnnnnnnnnnnnnnnnnnnnnnnnnnnnnnnnnnnnnnnnnnnnnnnnnnnnnnnnnnnnnnnnnnnnnnnnnnnnnnnnnnnnnnnnnnnnnnnnnnnnnnnnnnnnnnnnnnnnnnnnnnnnnnnnnnnnnnnnnnnnnnnnnnnnnnnnnnnnnnnnnnnnnnnnnnnnnnnnnnnnnnnnnnnnnnnnnnnnnnnnnnnnnnnnnnnnnnnnnnnnnnnnnnnnnnnnnnnnnnnnnnnnnnnnnnnnnnnnnnnnnnnnnnnnnnnnnnnnnnnnnnnnnnnnnnnnnnnnnnnnnnnnnnnnnnnnnnnnnnnnnnnnnnnnnnnnnnnnnnnnnnnnnnnnnnnnnnnnnnnnnnnnnnnnnnnnnnnnnnnnnnnnnnnnnnnnnnnnnnnnnnnnnnnnnnnnnnnnnnnnnnnnnnnnnnnnnnnnnnnnnnnnnnnnnnnnnnnnnnnnnnnnnnnnnnnnnnnnnnnnnnnnnnnnnnnnnnnnnnnnnnnnnnnnnnnnnnnnnnnnnnnnnnnnnnnnnnnnnnnnnnnnnnnnnnnnnnnnnnnnnnnnnnnnnnnnnnnnnnnnnnnnnnnnnnnnnnnnnnnnnnnnnnnnnnnnnnnnnnnnnnnnnnnnnnnnnnnnnnnnnnnnnnnnnnnnnnnnnnnnnnnnnnnnnnnnnnnnnnnnnnnnnnnnnnnnnnnnnnnnnnnnnnnnnnnnnnnnnnnnnnnnnnnnnnnnnnnnnnnnnnnnnnnnnnnnnnnnnnnnnnnnnnnnnnnnnnnnnnnnnnnnnnnnnnnnnnnnnnnnnnnnnnnnnnnnnnnnnnnnnnnnnnnnnnnnnnnnnnnnnnnnnnnnnnnnnnnnnnnnnnnnnnnnnnnnnnnnnnnnnnnnnnnnnnnnnnnnnnnnnnnnnnnnnnnnnnnnnnnnnnnnnnnnnnnnnnnnnnnnnnnnnnnnnnnnnnnnnnnnnnnnnnnnnnnnnnnnnnnnnnnnnnnnnnnnnnnnnnnnnnnnnnnnnnnnnnnnnnnnnnnnnnnnnnnnnnnnnnnnnnnnnnnnnnnnnnnnnnnnnnnnnnnnnnnnnnnnnnnnnnnnnnnnnnnnnnnnnnnnnnnnnnnnnnnnnnnnnnnnnnnnnnnnnnnnnnnnnnnnnnnnnnnnnnnnnnnnnnnnnnnnnnnnnnnnnnnnnnnnnnnnnnnnnnnnnnnnnnnnnnnnnnnnnnnnnnnnnnnnnnnnnnnnnnnnnnnnnnnnnnnnnnnnnnnnnnnnnnnnnnnnnnnnnnnnnnnnnnnnnnnnnnnnnnnnnnnnnnnnnnnnnnnnnnnnnnnnnnnnnnnnnnnnnnnnnnnnnnnnnnnnnnnnnnnnnnnnnnnnnnnnnnnnnnnnnnnnnnnnnnnnnnnnnnnnnnnnnnnnnnnnnnnnnnnnnnnnnnnnnnnnnnnnnnnnnnnnnnnnnnnnnnnnnnnnnnnnnnnnnnnnnnnnnnnnnnnnnnnnnnnnnnnnnnnnnnnnnnnnnnnnnnnnnnnnnnnnnnnnnnnnnnnnnnnnnnnnnnnnnnnnnnnnnnnnnnnnnnnnnnnnnnnnnnnnnnnnnnnnnnnnnnnnnnnnnnnnnnnnnnnnnnnnnnnnnnnnnnnnnnnnnnnnnnnnnnnnnnnnnnnnnnnnnnnnnnnnnnnnnnnnnnnnnnnnnnnnnnnnnnnnnnnnnnnnnnnnnnnnnnnnnnnnnnnnnnnnnnnnnnnnnnnnnnnnnnnnnnnnnnnnnnnnnnnnnnnnnnnnnnnnnnnnnnnnnnnnnnnnnnnnnnnnnnnnnnnnnnnnnnnnnnnnnnnnnnnnnnnnnnnnnnnnnnnnnnnnnnnnnnnnnnnnnnnnnnnnnnnnnnnnnnnnnnnnnnnnnnnnnnnnnnnnnnnnnnnnnnnnnnnnnnnnnnnnnnnnnnnnnnnnnnnnnnnnnnnnnnnnnnnnnnnnnnnnnnnnnnnnnnnnnnnnnnnnnnnnnnnnnnnnnnnnnnnnnnnnnnnnnnnnnnnnnnnnnnnnnnnnnnnnnnnnnnnnnnnnnnnnnnnnnnnnnnnnnnnnnnnnnnnnnnnnnnnnnnnnnnnnnnnnnnnnnnnnnnnnnnnnnnnnnnnnnnnnnnnnnnnnnnnnnnnnnnnnnnnnnnnnnnnnnnnnnnnnnnnnnnnnnnnnnnnnnnnnnnnnnnnnnnnnnnnnnnnnnnnnnnnnnnnnnnnnnnnnnnnnnnnnnnnnnnnnnnnnnnnnnnnnnnnnnnnnnnnnnnnnnnnnnnnnnnnnnnnnnnnnnnnnnnnnnnnnnnnnnnnnnnnnnnnnnnnnnnnnnnnnnnnnnnnnnnnnnnnnnnnnnnnnnnnnnnnnnnnnnnnnnnnnnnnnnnnnnnnnnnnnnnnnnnnnnnnnnnnnnnnnnnnnnnnnnnnnnnnnnnnnnnnnnnnnnnnnnnnnnnnnnnnnnnnnnnnnnnnnnnnnnnnnnnnnnnnnnnnnnnnnnnnnnnnnnnnnnnnnnnnnnnnnnnnnnnnnnnnnnnnnnnnnnnnnnnnnnnnnnnnnnnnnnnnnnnnnnnnnnnnnnnnnnnnnnnnnnnnnnnnnnnnnnnnnnnnnnnnnnnnnnnnnnnnnnnnnnnnnnnnnnnnnnnnnnnnnnnnnnnnnnnnnnnnnnnnnnnnnnnnnnnnnnnnnnnnnnnnnnnnnnnnnnnnnnnnnnnnnnnnnnnnnnnnnnnnnnnnnnnnnnnnnnnnnnnnnnnnnnnnnnnnnnnnnnnnnnnnnnnnnnnnnnnnnnnnnnnnnnnnnnnnnnnnnnnnnnnnnnnnnnnnnnnnnnnnnnnnnnnnnnnnnnnnnnnnnnnnnnnnnnnnnnnnnnnnnnnnnnnnnnnnnnnnnnnnnnnnnnnnnnnnnnnnnnnnnnnnnnnnnnnnnnnnnnnnnnnnnnnnnnnnnnnnnnnnnnnnnnnnnnnnnnnnnnnnnnnnnnnnnnnnnnnnnnnnnnnnnnnnnnnnnnnnnnnnnnnnnnnnnnnnnnnnnnnnnnnnnnnnnnnnnnnnnnnnnnnnnnnnnnnnnnnnnnnnnnnnnnnnnnnnnnnnnnnnnnnnnnnnnnnnnnnnnnnnnnnnnnnnnnnnnnnnnnnnnnnnnnnnnnnnnnnnnnnnnnnnnnnnnnnnnnnnnnnnnnnnnnnnnnnnnnnnnnnnnnnnnnnnnnnnnnnnnnnnnnnnnnnnnnnnnnnnnnnnnnnnnnnnnnnnnnnnnnnnnnnnnnnnnnnnnnnnnnnnnnnnnnnnnnnnnnnnnnnnnnnnnnnnnnnnnnnnnnnnnnnnnnnnnnnnnnnnnnnnnnnnnnnnnnnnnnnnnnnnnnnnnnnnnnnnnnnnnnnnnnnnnnnnnnnnnnnnnnnnnnnnnnnnnnnnnnnnnnnnnnnnnnnnnnnnnnnnnnnnnnnnnnnnnnnnnnnnnnnnnnnnnnnnnnnnnnnnnnnnnnnnnnnnnnnnnnnnnnnnnnnnnnnnnnnnnnnnnnnnnnnnnnnnnnnnnnnnnnnnnnnnnnnnnnnnnnnnnnnnnnnnnnnnnnnnnnnnnnnnnnnnnnnnnnnnnnnnnnnnnnnnnnnnnnnnnnnnnnnnnnnnnnnnnnnnnnnnnnnnnnnnnnnnnnnnnnnnnnnnnnnnnnnnnnnnnnnnnnnnnnnnnnnnnnnnnnnnnnnnnnnnnnnnnnnnnnnnnnnnnnnnnnnnnnnnnnnnnnnnnnnnnnnnnnnnnnnnnnnnnnnnnnnnnnnnnnnnnnnnnnnnnnnnnnnnnnnnnnnnnnnnnnnnnnnnnnnnnnnnnnnnnnnnnnnnnnnnnnnnnnnnnnnnnnnnnnnnnnnnnnnnnnnnnnnnnnnnnnnnnnnnnnnnnnnnnnnnnnnnnnnnnnnnnnnnnnnnnnnnnnnnnnnnnnnnnnnnnnnnnnnnnnnnnnnnnnnnnnnnnnnnnnnnnnnnnnnnnnnnnnnnnnnnnnnnnnnnnnnnnnnnnnnnnnnnnnnnnnnnnnnnnnnnnnnnnnnnnnnnnnnnnnnnnnnnnnnnnnnnnnnnnnnnnnnnnnnnnnnnnnnnnnnnnnnnnnnnnnnnnnnnnnnnnnnnnnnnnnnnnnnnnnnnnnnnnnnnnnnnnnnnnnnnnnnnnnnnnnnnnnnnnnnnnnnnnnnnnnnnnnnnnnnnnnnnnnnnnnnnnnnnnnnnnnnnnnnnnnnnnnnnnnnnnnnnnnnnnnnnnnnnnnnnnnnnnnnnnnnnnnnnnnnnnnnnnnnnnnnnnnnnnnnnnnnnnnnnnnnnnnnnnnnnnnnnnnnnnnnnnnnnnnnnnnnnnnnnnnnnnnnnnnnnnnnnnnnnnnnnnnnnnnnnnnnnnnnnnnnnnnnnnnnnnnnnnnnnnnnnnnnnnnnnnnnnnnnnnnnnnnnnnnnnnnnnnnnnnnnnnnnnnnnnnnnnnnnnnnnnnnnnnnnnnnnnnnnnnnnnnnnnnnnnnnnnnnnnnnnnnnnnnnnnnnnnnnnnnnnnnnnnnnnnnnnnnnnnnnnnnnnnnnnnnnnnnnnnnnnnnnnnnnnnnnnnnnnnnnnnnnnnnnnnnnnnnnnnnnnnnnnnnnnnnnnnnnnnnnnnnnnnnnnnnnnnnnnnnnnnnnnnnnnnnnnnnnnnnnnnnnnnnnnnnnnnnnnnnnnnnnnnnnnnnnnnnnnnnnnnnnnnnnnnnnnnnnnnnnnnnnnnnnnnnnnnnnnnnnnnnnnnnnnnnnnnnnnnnnnnnnnnnnnnnnnnnnnnnnnnnnnnnnnnnnnnnnnnnnnnnnnnnnnnnnnnnnnnnnnnnnnnnnnnnnnnnnnnnnnnnnnnnnnnnnnnnnnnnnnnnnnnnnnnnnnnnnnnnnnnnnnnnnnnnnnnnnnnnnnnnnnnnnnnnnnnnnnnnnnnnnnnnnnnnnnnnnnnnnnnnnnnnnnnnnnnnnnnnnnnnnnnnnnnnnnnnnnnnnnnnnnnnnnnnnnnnnnnnnnnnnnnnnnnnnnnnnnnnnnnnnnnnnnnnnnnnnnnnnnnnnnnnnnnnnnnnnnnnnnnnnnnnnnnnnnnnnnnnnnnnnnnnnnnnnnnnnnnnnnnnnnnnnnnnnnnnnnnnnnnnnnnnnnnnnnnnnnnnnnnnnnnnnnnnnnnnnnnnnnnnnnnnnnnnnnnnnnnnnnnnnnnnnnnnnnnnnnnnnnnnnnnnnnnnnnnnnnnnnnnnnnnnnnnnnnnnnnnnnnnnnnnnnnnnnnnnnnnnnnnnnnnnnnnnnnnnnnnnnnnnnnnnnnnnnnnnnnnnnnnnnnnnnnnnnnnnnnnnnnnnnnnnnnnnnnnnnnnnnnnnnnnnnnnnnnnnnnnnnnnnnnnnnnnnnnnnnnnnnnnnnnnnnnnnnnnnnnnnnnnnnnnnnnnnnnnnnnnnnnnnnnnnnnnnnnnnnnnnnnnnnnnnnnnnnnnnnnnnnnnnnnnnnnnnnnnnnnnnnnnnnnnnnnnnnnnnnnnnnnnnnnnnnnnnnnnnnnnnnnnnnnnnnnnnnnnnnnnnnnnnnnnnnnnnnnnnnnnnnnnnnnnnnnnnnnnnnnnnnnnnnnnnnnnnnnnnnnnnnnnnnnnnnnnnnnnnnnnnnnnnnnnnnnnnnnnnnnnnnnnnnnnnnnnnnnnnnnnnnnnnnnnnnnnnnnnnnnnnnnnnnnnnnnnnnnnnnnnnnnnnnnnnnnnnnnnnnnnnnnnnnnnnnnnnnnnnnnnnnnnnnnnnnnnnnnnnnnnnnnnnnnnnnnnnnnnnnnnnnnnnnnnnnnnnnnnnnnnnnnnnnnnnnnnnnnnnnnnnnnnnnnnnnnnnnnnnnnnnnnnnnnnnnnnnnnnnnnnnnnnnnnnnnnnnnnnnnnnnnnnnnnnnnnnnnnnnnnnnnnnnnnnnnnnnnnnnnnnnnnnnnnnnnnnnnnnnnnnnnnnnnnnnnnnnnnnnnnnnnnnnnnnnnnnnnnnnnnnnnnnnnnnnnnnnnnnnnnnnnnnnnnnnnnnnnnnnnnnnnnnnnnnnnnnnnnnnnnnnnnnnnnnnnnnnnnnnnnnnnnnnnnnnnnnnnnnnnnnnnnnnnnnnnnnnnnnnnnnnnnnnnnnnnnnnnnnnnnnnnnnnnnnnnnnnnnnnnnnnnnnnnnnnnnnnnnnnnnnnnnnnnnnnnnnnnnnnnnnnnnnnnnnnnnnnnnnnnnnnnnnnnnnnnnnnnnnnnnnnnnnnnnnnnnnnnnnnnnnnnnnnnnnnnnnnnnnnnnnnnnnnnnnnnnnnnnnnnnnnnnnnnnnnnnnnnnnnnnnnnnnnnnnnnnnnnnnnnnnnnnnnnnnnnnnnnnnnnnnnnnnnnnnnnnnnnnnnnnnnnnnnnnnnnnnnnnnnnnnnnnnnnnnnnnnnnnnnnnnnnnnnnnnnnnnnnnnnnnnnnnnnnnnnnnnnnnnnnnnnnnnnnnnnnnnnnnnnnnnnnnnnnnnnnnnnnnnnnnnnnnnnnnnnnnnnnnnnnnnnnnnnnnnnnnnnnnnnnnnnnnnnnnnnnnnnnnnnnnnnnnnnnnnnnnnnnnnnnnnnnnnnnnnnnnnnnnnnnnnnnnnnnnnnnnnnnnnnnnnnnnnnnnnnnnnnnnnnnnnnnnnnnnnnnnnnnnnnnnnnnnnnnnnnnnnnnnnnnnnnnnnnnnnnnnnnnnnnnnnnnnnnnnnnnnnnnnnnnnnnnnnnnnnnnnnnnnnnnnnnnnnnnnnnnnnnnnnnnnnnnnnnnnnnnnnnnnnnnnnnnnnnnnnnnnnnnnnnnnnnnnnnnnnnnnnnnnnnnnnnnnnnnnnnnnnnnnnnnnnnnnnnnnnnnnnnnnnnnnnnnnnnnnnnnnnnnnnnnnnnnnnnnnnnnnnnnnnnnnnnnnnnnnnnnnnnnnnnnnnnnnnnnnnnnnnnnnnnnnnnnnnnnnnnnnnnnnnnnnnnnnnnnnnnnnnnnnnnnnnnnnnnnnnnnnnnnnnnnnnnnnnnnnnnnnnnnnnnnnnnnnnnnnnnnnnnnnnnnnnnnnnnnnnnnnnnnnnnnnnnnnnnnnnnnnnnnnnnnnnnnnnnnnnnnnnnnnnnnnnnnnnnnnnnnnnnnnnnnnnnnnnnnnnnnnnnnnnnnnnnnnnnnnnnnnnnnnnnnnnnnnnnnnnnnnnnnnnnnnnnnnnnnnnnnnnnnnnnnnnnnnnnnnnnnnnnnnnnnnnnnnnnnnnnnnnnnnnnnnnnnnnnnnnnnnnnnnnnnnnnnnnnnnnnnnnnnnnnnnnnnnnnnnnnnnnnnnnnnnnnnnnnnnnnnnnnnnnnnnnnnnnnnnnnnnnnnnnnnnnnnnnnnnnnnnnnnnnnnnnnnnnnnnnnnnnnnnnnnnnnnnnnnnnnnnnnnnnnnnnnnnnnnnnnnnnnnnnnnnnnnnnnnnnnnnnnnnnnnnnnnnnnnnnnnnnnnnnnnnnnnnnnnnnnnnnnnnnnnnnnnnnnnnnnnnnnnnnnnnnnnnnnnnnnnnnnnnnnnnnnnnnnnnnnnnnnnnnnnnnnnnnnnnnnnnnnnnnnnnnnnnnnnnnnnnnnnnnnnnnnnnnnnnnnnnnnnnnnnnnnnnnnnnnnnnnnnnnnnnnnnnnnnnnnnnnnnnnnnnnnnnnnnnnnnnnnnnnnnnnnnnnnnnnnnnnnnnnnnnnnnnnnnnnnnnnnnnnnnnnnnnnnnnnnnnnnnnnnnnnnnnnnnnnnnnnnnnnnnnnnnnnnnnnnnnnnnnnnnnnnnnnnnnnnnnnnnnnnnnnnnnnnnnnnnnnnnnnnnnnnnnnnnnnnnnnnnnnnnnnnnnnnnnnnnnnnnnnnnnnnnnnnnnnnnnnnnnnnnnnnnnnnnnnnnnnnnnnnnnnnnnnnnnnnnnnnnnnnnnnnnnnnnnnnnnnnnnnnnnnnnnnnnnnnnnnnnnnnnnnnnnnnnnnnnnnnnnnnnnnnnnnnnnnnnnnnnnnnnnnnnnnnnnnnnnnnnnnnnnnnnnnnnnnnnnnnnnnnnnnnnnnnnnnnnnnnnnnnnnnnnnnnnnnnnnnnnnnnnnnnnnnnnnnnnnnnnnnnnnnnnnnnnnnnnnnnnnnnnnnnnnnnnnnnnnnnnnnnnnnnnnnnnnnnnnnnnnnnnnnnnnnnnnnnnnnnnnnnnnnnnnnnnnnnnnnnnnnnnnnnnnnnnnnnnnnnnnnnnnnnnnnnnnnnnnnnnnnnnnnnnnnnnnnnnnnnnnnnnnnnnnnnnnnnnnnnnnnnnnnnnnnnnnnnnnnnnnnnnnnnnnnnnnnnnnnnnnnnnnnnnnnnnnnnnnnnnnnnnnnnnnnnnnnnnnnnnnnnnnnnnnnnnnnnnnnnnnnnnnnnnnnnnnnnnnnnnnnnnnnnnnnnnnnnnnnnnnnnnnnnnnnnnnnnnnnnnnnnnnnnnnnnnnnnnnnnnnnnnnnnnnnnnnnnnnnnnnnnnnnnnnnnnnnnnnnnnnnnnnnnnnnnnnnnnnnnnnnnnnnnnnnnnnnnnnnnnnnnnnnnnnnnnnnnnnnnnnnnnnnnnnnnnnnnnnnnnnnnnnnnnnnnnnnnnnnnnnnnnnnnnnnnnnnnnnnnnnnnnnnnnnnnnnnnnnnnnnnnnnnnnnnnnnnnnnnnnnnnnnnnnnnnnnnnnnnnnnnnnnnnnnnnnnnnnnnnnnnnnnnnnnnnnnnnnnnnnnnnnnnnnnnnnnnnnnnnnnnnnnnnnnnnnnnnnnnnnnnnnnnnnnnnnnnnnnnnnnnnnnnnnnnnnnnnnnnnnnnnnnnnnnnnnnnnnnnnnnnnnnnnnnnnnnnnnnnnnnnnnnnnnnnnnnnnnnnnnnnnnnnnnnnnnnnnnnnnnnnnnnnnnnnnnnnnnnnnnnnnnnnnnnnnnnnnnnnnnnnnnnnnnnnnnnnnnnnnnnnnnnnnnnnnnnnnnnnnnnnnnnnnnnnnnnnnnnnnnnnnnnnnnnnnnnnnnnnnnnnnnnnnnnnnnnnnnnnnnnnnnnnnnnnnnnnnnnnnnnnnnnnnnnnnnnnnnnnnnnnnnnnnnnnnnnnnnnnnnnnnnnnnnnnnnnnnnnnnnnnnnnnnnnnnnnnnnnnnnnnnnnnnnnnnnnnnnnnnnnnnnnnnnnnnnnnnnnnnnnnnnnnnnnnnnnnnnnnnnnnnnnnnnnnnnnnnnnnnnnnnnnnnnnnnnnnnnnnnnnnnnnnnnnnnnnnnnnnnnnnnnnnnnnnnnnnnnnnnnnnnnnnnnnnnnnnnnnnnnnnnnnnnnnnnnnnnnnnnnnnnnnnnnnnnnnnnnnnnnnnnnnnnnnnnnnnnnnnnnnnnnnnnnnnnnnnnnnnnnnnnnnnnnnnnnnnnnnnnnnnnnnnnnnnnnnnnnnnnnnnnnnnnnnnnnnnnnnnnnnnnnnnnnnnnnnnnnnnnnnnnnnnnnnnnnnnnnnnnnnnnnnnnnnnnnnnnnnnnnnnnnnnnnnnnnnnnnnnnnnnnnnnnnnnnnnnnnnnnnnnnnnnnnnnnnnnnnnnnnnnnnnnnnnnnnnnnnnnnnnnnnnnnnnnnnnnnnnnnnnnnnnnnnnnnnnnnnnnnnnnnnnnnnnnnnnnnnnnnnnnnnnnnnnnnnnnnnnnnnnnnnnnnnnnnnnnnnnnnnnnnnnnnnnnnnnnnnnnnnnnnnnnnnnnnnnnnnnnnnnnnnnnnnnnnnnnnnnnnnnnnnnnnnnnnnnnnnnnnnnnnnnnnnnnnnnnnnnnnnnnnnnnnnnnnnnnnnnnnnnnnnnnnnnnnnnnnnnnnnnnnnnnnnnnnnnnnnnnnnnnnnnnnnnnnnnnnnnnnnnnnnnnnnnnnnnnnnnnnnnnnnnnnnnnnnnnnnnnnnnnnnnnnnnnnnnnnnnnnnnnnnnnnnnnnnnnnnnnnnnnnnnnnnnnnnnnnnnnnnnnnnnnnnnnnnnnnnnnnnnnnnnnnnnnnnnnnnnnnnnnnnnnnnnnnnnnnnnnnnnnnnnnnnnnnnnnnnnnnnnnnnnnnnnnnnnnnnnnnnnnnnnnnnnnnnnnnnnnnnnnnnnnnnnnnnnnnnnnnnnnnnnnnnnnnnnnnnnnnnnnnnnnnnnnnnnnnnnnnnnnnnnnnnnnnnnnnnnnnnnnnnnnnnnnnnnnnnnnnnnnnnnnnnnnnnnnnnnnnnnnnnnnnnnnnnnnnnnnnnnnnnnnnnnnnnnnnnnnnnnnnnnnnnnnnnnnnnnnnnnnnnnnnnnnnnnnnnnnnnnnnnnnnnnnnnnnnnnnnnnnnnnnnnnnnnnnnnnnnnnnnnnnnnnnnnnnnnnnnnnnnnnnnnnnnnnnnnnnnnnnnnnnnnnnnnnnnnnnnnnnnnnnnnnnnnnnnnnnnnnnnnnnnnnnnnnnnnnnnnnnnnnnnnnnnnnnnnnnnnnnnnnnnnnnnnnnnnnnnnnnnnnnnnnnnnnnnnnnnnnnnnnnnnnnnnnnnnnnnnnnnnnnnnnnnnnnnnnnnnnnnnnnnnnnnnnnnnnnnnnnnnnnnnnnnnnnnnnnnnnnnnnnnnnnnnnnnnnnnnnnnnnnnnnnnnnnnnnnnnnnnnnnnnnnnnnnnnnnnnnnnnnnnnnnnnnnnnnnnnnnnnnnnnnnnnnnnnnnnnnnnnnnnnnnnnnnnnnnnnnnnnnnnnnnnnnnnnnnnnnnnnnnnnnnnnnnnnnnnnnnnnnnnnnnnnnnnnnnnnnnnnnnnnnnnnnnnnnnnnnnnnnnnnnnnnnnnnnnnnnnnnnnnnnnnnnnnnnnnnnnnnnnnnnnnnnnnnnnnnnnnnnnnnnnnnnnnnnnnnnnnnnnnnnnnnnnnnnnnnnnnnnnnnnnnnnnnnnnnnnnnnnnnnnnnnnnnnnnnnnnnnnnnnnnnnnnnnnnnnnnnnnnnnnnnnnnnnnnnnnnnnnnnnnnnnnnnnnnnnnnnnnnnnnnnnnnnnnnnnnnnnnnnnnnnnnnnnnnnnnnnnnnnnnnnnnnnnnnnnnnnnnnnnnnnnnnnnnnnnnnnnnnnnnnnnnnnnnnnnnnnnnnnnnnnnnnnnnnnnnnnnnnnnnnnnnnnnnnnnnnnnnnnnnnnnnnnnnnnnnnnnnnnnnnnnnnnnnnnnnnnnnnnnnnnnnnnnnnnnnnnnnnnnnnnnnnnnnnnnnnnnnnnnnnnnnnnnnnnnnnnnnnnnnnnnnnnnnnnnnnnnnnnnnnnnnnnnnnnnnnnnnnnnnnnnnnnnnnnnnnnnnnnnnnnnnnnnnnnnnnnnnnnnnnnnnnnnnnnnnnnnnnnnnnnnnnnnnnnnnnnnnnnnnnnnnnnnnnnnnnnnnnnnnnnnnnnnnnnnnnnnnnnnnnnnnnnnnnnnnnnnnnnnnnnnnnnnnnnnnnnnnnnnnnnnnnnnnnnnnnnnnnnnnnnnnnnnnnnnnnnnnnnnnnnnnnnnnnnnnnnnnnnnnnnnnnnnnnnnnnnnnnnnnnnnnnnnnnnnnnnnnnnnnnnnnnnnnnnnnnnnnnnnnnnnnnnnnnnnnnnnnnnnnnnnnnnnnnnnnnnnnnnnnnnnnnnnnnnnnnnnnnnnnnnnnnnnnnnnnnnnnnnnnnnnnnnnnnnnnnnnnnnnnnnnnnnnnnnnnnnnnnnnnnnnnnnnnnnnnnnnnnnnnnnnnnnnnnnnnnnnnnnnnnnnnnnnnnnnnnnnnnnnnnnnnnnnnnnnnnnnnnnnnnnnnnnnnnnnnnnnnnnnnnnnnnnnnnnnnnnnnnnnnnnnnnnnnnnnnnnnnnnnnnnnnnnnnnnnnnnnnnnnnnnnnnnnnnnnnnnnnnnnnnnnnnnnnnnnnnnnnnnnnnnnnnnnnnnnnnnnnnnnnnnnnnnnnnnnnnnnnnnnnnnnnnnnnnnnnnnnnnnnnnnnnnnnnnnnnnnnnnnnnnnnnnnnnnnnnnnnnnnnnnnnnnnnnnnnnnnnnnnnnnnnnnnnnnnnnnnnnnnnnnnnnnnnnnnnnnnnnnnnnnnnnnnnnnnnnnnnnnnnnnnnnnnnnnnnnnnnnnnnnnnnnnnnnnnnnnnnnnnnnnnnnnnnnnnnnnnnnnnnnnnnnnnnnnnnnnnnnnnnnnnnnnnnnnnnnnnnnnnnnnnnnnnnnnnnnnnnnnnnnnnnnnnnnnnnnnnnnnnnnnnnnnnnnnnnnnnnnnnnnnnnnnnnnnnnnnnnnnnnnnnnnnnnnnnnnnnnnnnnnnnnnnnnnnnnnnnnnnnnnnnnnnnnnnnnnnnnnnnnnnnnnnnnnnnnnnnnnnnnnnnnnnnnnnnnnnnnnnnnnnnnnnnnnnnnnnnnnnnnnnnnnnnnnnnnnnnnnnnnnnnnnnnnnnnnnnnnnnnnnnnnnnnnnnnnnnnnnnnnnnnnnnnnnnnnnnnnnnnnnnnnnnnnnnnnnnnnnnnnnnnnnnnnnnnnnnnnnnnnnnnnnnnnnnnnnnnnnnnnnnnnnnnnnnnnnnnnnnnnnnnnnnnnnnnnnnnnnnnnnnnnnnnnnnnnnnnnnnnnnnnnnnnnnnnnnnnnnnnnnnnnnnnnnnnnnnnnnnnnnnnnnnnnnnnnnnnnnnnnnnnnnnnnnnnnnnnnnnnnnnnnnnnnnnnnnnnnnnnnnnnnnnnnnnnnnnnnnnnnnnnnnnnnnnnnnnnnnnnnnnnnnnnnnnnnnnnnnnnnnnnnnnnnnnnnnnnnnnnnnnnnnnnnnnnnnnnnnnnnnnnnnnnnnnnnnnnnnnnnnnnnnnnnnnnnnnnnnnnnnnnnnnnnnnnnnnnnnnnnnnnnnnnnnnnnnnnnnnnnnnnnnnnnnnnnnnnnnnnnnnnnnnnnnnnnnnnnnnnnnnnnnnnnnnnnnnnnnnnnnnnnnnnnnnnnnnnnnnnnnnnnnnnnnnnnnnnnnnnnnnnnnnnnnnnnnnnnnnnnnnnnnnnnnnnnnnnnnnnnnnnnnnnnnnnnnnnnnnnnnnnnnnnnnnnnnnnnnnnnnnnnnnnnnnnnnnnnnnnnnnnnnnnnnnnnnnnnnnnnnnnnnnnnnnnnnnnnnnnnnnnnnnnnnnnnnnnnnnnnnnnnnnnnnnnnnnnnnnnnnnnnnnnnnnnnnnnnnnnnnnnnnnnnnnnnnnnnnnnnnnnnnnnnnnnnnnnnnnnnnnnnnnnnnnnnnnnnnnnnnnnnnnnnnnnnnnnnnnnnnnnnnnnnnnnnnnnnnnnnnnnnnnnnnnnnnnnnnnnnnnnnnnnnnnnnnnnnnnnnnnnnnnnnnnnnnnnnnnnnnnnnnnnnnnnattgcccaggacggagccaaaggcgaagtcctggggccgacggcaagctacactcgtcccgagtcccgcagggacgacggaaaaccaatcccgccgatcctccgccatccctacggaactccggtgatctcatatctgcccctgctccggaaccccaggaatgaattcctgggctattgcccgcagtgccctcggcactgatgctggatctggaataattgtgcccagtccctacggggccaacgctcgtttcacgaccctgctccagccccggcgtttcatcacggctctctcgtctgtccccgcggcactgagcctggatcttaggccccccgctccgagtcgaggccatcccgtcccggctactgacggtcgtgtctttgggacggtgccaggagctacgagaccgggcaatgatcatgccggccccatgcgagagcgttcgtgcacccccacaccgggggaaacgagtgtaaacactggggtttacactctcccgcaccacccattgacaccacgggaaacggctatatactaacaggtagaagaagggagagaccccggagcgggaggggatctcgctagtgcggcagtgcggcgcgttggtcatggcgagagaccccggagcgggaggggatctccccagccgccgtcctccgccggcgagccgggcagagagaccccggagcgggaggggatctcccctcggagagagacggtgggaggactcccgccgtcttgtagaagtcgcatccgctgccgctacaagcgggtgccaaactcgcggcgtggcctgtgcccgcgcagacgagagtcgcgacgcagctttggactgtcctgtgagcatggcgagccgtggccagcggggcccgtgagctgtgccctgctcacccgatccgacggaccgttccgcctctggcggagaggagatggaggaacatggcagaatcgtttaatcttctcgagaagggttggatcccagttctgttcggcaacggggaggtatgccgggttggcataacagaggcgtttactaaggctggccagattcgacagatcgcgacaagcaatccgatggaccgtattgctgtgttgcgtttcttgcttgccctcctttactggtgcaaagggaatcctcccagtgatcgaagcgagttgcctcgagattcgttcccggcagattggttctccaagctgaaccaaaacaaagagtgtttcgaccttcttggtgatggcaagcgcttctaccaggatcgcagcggggttcgcgtggctcgcaccgagaagggaaaagaggcggttatgtatctgatccaggagattcccactggcaataacttctggcatttccgtcattcgaccgacaggcaggatgggctgtgtattgcgtgttgtgcaatgggacttttgcgtttgccactgttttttgctatgggtgggcgagggtatccgcctggcattaatggcgctccgccgctctatgtccttccctgtggtaagtcgttgttggacacgctgctcgcaaactggcatgtggttgacgacctcggcgatccggcgtggctcgatcccaccgtcagaccaccccaaggtcagcccgtgcctatgcttaccgggttgacgctgctttccagacgggtatggttgtcggatccgacaccgcccccgggcatgtgcatcgtatgtggagcgagggaacaagctcttatccgaacatgtgaattccagactgcaggcaggcaagagaacgaactgtggaacgatccccatgtcgtttatctcgacaaaacgccacgacgtggcctcagggcttctgacccgacagcaccacgcggatttaccatggatcgcccgtggctggacctgctcgcccgtgtggtcgaaacacgcaagttcggagccgaacacagcgatacgccacttctcgtcgtaggatttgcaaccaagaaggctctaagcatcgacgtttgggagcgcacgctcgtcctgccagcaagggcatcgttcaagaacgatcccgtagctctcctcaggcgttggggcaggtggccatcgcatttcaagagcacgctaagcaacatactgagaccgaagtcgcaaaaggtatcgaacctgggtgccgctaccgcttccgtggtttgtcctcaagttgaagggcgagtttcttccaatgtaagtgtactgcttgctggtgggaatgaagcctgggagcgagcggcagacgaatacccacggttggttcagagcgtcgcaagatcgctttctcccggtttcacaacggcagcggtccagcgtcgtatgcagattgccgctgtaaaacccaacgtgcaggcagataagcaatcccgtaagaaacagacgcgaaagaaaggaggtgctgagtgaccgagacggagaaatatgtcgccaaactgacaacgctgaaatccggcgacctcggactgttgcgcttgcatgccggtcgagacctcgaccacagcgttgccgcgttcgacctgttcacgggtctctggtggcctctcaggaaggaaagtccgagagtgcctcgtcgaaaagtcgcatggttggtagcgaaactctacgcatttcgcccgatcccgcacgaccggggcaagacgctcgcacgccagcttcgacgatgcgaacccaacaacgacggcggccgtttcaggcagaagttcgacttgatgctgacgctctcgcttgacgagatcgaaccagcgctgcaatgggcgctcgacctggtaggctcgcaacgcctaaacattgactgggtaaaactcaccgatgatctctccatctgggagagagaagaaactcggctccgatgggccgaggaactccttgcacacaacgaaaggagaaacgaatgttgatagagatccacgtaatccaaaatcactgtccggccaatctgaaccgggacgatctgggcgcaccaaaaacttgctacttcggtggcgtcctgcgctcccgcatttccagccagtgcatcaaacgaagcatacgcaccagcgatgagttcaagacacttctcggcggtgtacgtacacggcagttagccaagctcattgccgaagagctcgcgggcgacgataaggtcgagaaacgagcagagaagattttgcacctgtgcgggttcgaggcgaagaagggtaaggctcaagccgccggcgaagatgaagaggctcccgaagccggggaaaggagcaagatgctcatctacacgactcgccaagcgatcaaggagatggcaaatctgctcaaaaacgaaggagcaaatgacaaggacttggcaagaagctttgctgagctgatcgccacccgaactgccgttccggatatggcactttcggggcgtatgttggagccgggcaaggtggatgaagaagtatggaaagagtataagaggaacgtcgaggcagcgctccaagtcgcgcatgcgatctctacgcatgaagccagaccggaggtggactactatgtcgcagccgatgacatcccgggcgaagacgcaggagcgggctacgtggacgaggcacttttcgcgtccgcctgtttctacaagtacttctcgattcactgggaaacgctcgtcgacaatctcgctgcatttccaggcaacaaagagcacttggccgcccacaccgtaggtgcttttatcagggctgctctcctgaccaatccctccggcaagcagaacagcttcgcatcgcattgccgccccgatggcgtgttgatcgaaataaggaataaccctatcaactacgccaacgcctttgccaagcccgttgccataggggaccggggggacattctcagccagtcgatcgctcagcttgcacagtacgtcctcgacctggacacgggctacggcagaccggagaaacgcttctggttctcacccaatctccgttgtcccttcagtgtggcgattgacaagaaggaagtcaagcttgccgatgagaacttcacctcccttgacgtactgatccctgccgtgatcagcgccattggatatgactggcagcaggtccagaaggttgccctaaggccagaggtgctcggatgaacgctaatacgctattcctccgtctcgaaggaccgctccaggcgtggggcaataacgaatcgaagttcctcgttcgccgcactgccgaagctccaaccaagtccggcgtcattgggctactctgcgccgccttaggcgcttcgcgcacatccgcgcgggatcaatggttaccgaaactcaatagcttgcttatgggagttcgcattgactccccgggtgtacgttgctgggatttccacacggtcggagccggcatgcaaatgcgcatcgccgaagctgaaggtaagacaaaaccgggagccatgctcacccgtcgagagtacctatgcgatgcatcattcctcgttgcccttcaaggcgagcatccgctgatagaagaactcgaaagccacttgcgcaggccgcgctgggctctctacctgggcagaaaatgctgtcccccatcgcggccactcttggagcatccccccggatcgttccccgatcccctttcggccctccggtccgttccctggagacgccgtcttcaggatgacccccttctggagactctggattgcctgctcgactggaggccgtcaaaggaccagtccgaagcacccccagacgcacttgtctgctatgacgtgccactcagcttcgacccgcccgcgcatgccccgcgcttcgtcgtccgcaaacagctcagtcttggcaccgacgacggtgtgacagtggcagatcgccctgctcaaacaaccgtgcgtaagcccgaccgcccccgggcagactaccgcaactccgaatacagaaaacgccgacaagaaaggctcaaagaggaccatcagctctgcgtcttctgcaagagtccagccactactgtacaacacatcacctaccgtcgcgcaggcggcgatgaggtccttgacgatctcagatcactctgtcgcctatgccatgatgccatcaccatgatagaatatggcctgggcatggacctcgaccgcataaaccccgaagacccacgcttgcgagaccagatcatcgaaaaacgtaacgagatcatccggtttcgctcgctccaaactcgaatacgccggctcgaacccgaggaggtcgaatagccatgtatctttcctatctcctgataaacgtcggcgacaacccggaccgcccgcgaccgggcaggctttggctccgaaacatgtatcacgtccaccagcgcctttgcatggccttcccgtccagggaccacaaggaaaacgatacgcgcttcctcgaaccctactcgcccgacgatttcccaataactcacgtccatcttccccgctcgtcaggcgtagggttcctctttcgcgttgacccaataccaggaggtagccccattatcaccgtccagtctgccgtggagccggactgggagtatgcattccagaatgctggctacctcttggctcaccccccgatcgtcaatgacttcgatcctcgcttcccgccaaatcagcgccttgcctttcgcctcagggcgaatccggtcagaagagcgtccagcaactcccgcgacagcgaaggaaacacgctcgatgcaaaatggcacggcaaacgcatccccgtcccattccaccagctcgatctttggctctctcgtcacgccgagcgtcctagcagcggcttcaagatcttgacaatcgcgaggaaaaccacaggctacgtgtatctcaaaaagaaggaaaccaatgaaaagtcccagcgcctcttctccgtactcttcgagggatacctcgaagtcaccgatactcacaatctcgccacgacgctcgcaagaggcatcggcccggccaaggccttcggcttcggtctcctttccgtcaagcctctgaaggacacgaaccaatgatcccagccagcctcagcaatccagaagcccacccgaggcgaccagggggcaccttcctgcctcgaagcgtctccccgagtccctcggaactgacaggccatgcgtaacctacatgccttgccgaagttcggcgaccggtggagttacctctacctcgaacatggccggctcgaccaggaggccgccgcactcaccttctacgacaaggacggcgacctccgcatccccattgaccaactcgcagtgctgatgctcggccccggtacgacgctcacccacgccgccatgaaagcccttgccgaaaacaactgcctcgtctgctgggttggcgaacaatgtgtccgcgtctatgcccattccaccggcgggactcacacctccactcgcctccttcgccaggccgcgctctacaccgatccggaggaacgccgccaggtcgtgatccgcatgtaccagaagcgcttccccacaccgctccccccaacgatctcgatcgagcagatccgcggtctcgaaggctcccgtgtccgacaagcctacgagaggatcgctcgcgaactcggcgtccactggcactgtcgctcctacgaccaagacgattggcgggccgcggaccccctcaaccgcgccctttcggtcgcaaattcctgtctctacggcgtctgccatgcggcgatccttgccgccggctactctccggccatcggcttcatccataccggcacgatgctcagcttcgtctacgacatcgccgacctctacaagacagacctcaccgtcccgctcgcgttccgcgtcgcagccgagtatgaacagcgcggagctgacgcgcaagagccgcgtgggatgatcccgcggcaaaccacgccccccgcccgctcgccgcggaccgacagcgccgaagctgccgaggagacgtgcggtcacatgcaacatggcacctcacccgcacgaccactcgccaacccttctccgcaaagcatctcccccggagctcgaatgccgctcgaacgtcgcgtacggcttgcctgccgagacatcttctacgaggagaaactcctcgaccgaatcctaccagacatagcggaggtgctacatgctcctgatgatcttggagaggtgcccaacgagtttgaggggcgcattgtcacgctatctgatcgaaccgaaagcgggagtcttcctcggaaatcccagcgcaagaatccgtgacgaactctggaaaatcgccctcggaaagatcggcgaggggtgggtcctccaggtgtggagtgatcgctgcccccagggctacagatggcgcaccttcggccagaacgatcgggaaatcgtcgacatggaaggtatcagcctcgtccggttccgacaccgaaccgcctccgctgacgaaaaacacgagaaaactcacgaccagtagaccgcaaaagctctttgacaatctgccttgccctactcccctctggagagcacacagattctcccttgtctcctcaggggatcgccctaccactaccccttgtggtactccgccccacctgatacaatatactggtatcttccccacgcatgtgggggtgaaccgccaagggcttgagattttgaggggcttagaccatcttccccacgcatgtgggggtgaaccagtaggaatccaacattaggtatgctgtttctaatcttccccacgcatgtgggggtgaaccgcgcatcgagcgtgtaagaacgatcagccaggtatcttccccacgcatgtgggggtgaaccggatgagttgaaagagtggtttagaaagattatatcttccccacgcatgtgggggtgaaccgccaaacgggaatgagcgtgagcgaatccacggatcttccccacgcatgtgggggtgaacctgcttccgcaatccgatcgaatactgtcatgtcatcttccccacgcatgtgggggtgaaccggcaccacactgaccgccagagttggctatgctatcttccccacgcatgtgggggtgaaccaccaatccccaccgcctccgccatgagcgaaagatcttccccacgcatgtgggggtgaaccttcgagggatgcataatggcgctgtgcgcaggaatcttccccacgcatgtgggggtgaaccagcttgctactcgcattcatcacgccgtcaacgatcttccccacgcatgtgggggtgaaccggtcgccccagtcctcgacaagccgcgcgtctaatcttccccacgcatgtgggggtgaaccgaagccagactgactcgatcatcgtggggatcaatcttccccacgcatgtgggggtgaaccgcaaaatgacacatccccgcctgccggtcccagatcttccccacgcatgtgggggtgaaccggttgggtacgttgtccggggcgggagaccaatatcttccccacgcatgtgggggtgaaccgcaagcgctcgaaaaagtcgcaggcgagccgcgatcttccccacgcatgtgggggtgaaccgtagtttccgcgcctaactgcgtgctgcggagcatcttccccacgcatgtgggggtgaacccgcttggagcatgtgtgcccgatattctcgcaaatcttccccacgcatgtgggggtgaaccttcctgcgccgatgccgcataatgctccctgccatcttccccacgcatgtgggggtgaaccgccacttccccagttgccaacctgcccatgcggatcttccccacgcatgtgggggtgaaccgcccttagacgaaaagcaattcgagggatgcatatcttccccacgcatgtgggggtgaaccgcttccagccgtagcactggaagccgtcaatcaatcttccccacgcatgtgggggtgaaccttggggagatggcttgcggaagccagcggctttatcttccccacgcatgtgggggtgaaccgttcgcactgcccgctttacagtatggctggcaatcttccccacgcatgtgggggtgaaccgttatccacaaaaaaagggcacttaggaaccgcatcttccccacgcatgtgggggtgaaccggggattgacatagtgcttgaggcaatggcgcgatcttccccacgcatgtgggggtgaaccgtattgcacttctgtcttggcggcggctgattaatcttccccacgcatgtgggggtgaaccggggccgaattgtaaagaattgtaattggggttatcttccccacgcatgtgggggtgaaccgtgcaatccccgcccccaatggcgtcttgccgcatcttccccacgcatgtgggggtgaaccagctcacaaagcatcgcccccgcgcctgccgcaatcttccccacgcatgtgggggtgaaccgtcggtctccggagcgggccacgaacagcgagtatcttccccacgcatgtgggggtgaaccgtttgtcccgacggggatcaaaccgcaagaagcatcttccccacgcatgtgggggtgaacctgcagccattgcggatcaggccgcgggggtgaaatcttccccacgcatgtgggggtgaacctgtatggggcagagccgggctgcgactggacggatcttccccacgcatgtgggggtgaaccgacccgcctcacacctgtcattccaagagatacatcttccccacgcatgtgggggtgaaccaacatggccgcatccggggggagggttccggggatcttccccacgcatgtgggggtgaaccgatggacagctcgtattcaaggtgtggcatggaatcttccccacgcatgtgggggtgaaccttttttcaggcctatctgaaaaaatccgaaagaatcttccccacgcatgtgggggtgaaccctctacagtcgccccactcagctcgttgcgtgcatcttccccacgcatgtgggggtgaacctatgattgcgaggatatcgggcacgcatgctccatcttccccacgcatgtgggggtgaacctcctgcgaccgagcaggtgctggctgcggatcgatcttccccacgcatgtgggggtgaaccagtggaggagctgagcggtgttgaaataatggcatcttccccacgcatgtgggggtgaaccaagcagaatcgccaagcccccaccagcgaagagatcttccccacgcatgtgggggtgaaccgccagaggggcatttccacgcgaaagaagcctaatcttccccacgcatgtgggggtgaaccgcaaggccttgacaaagcctctatccacgtcgtatcttccccacgcatgtgggggtgaaccctcatggccgtgtatgcatgcgtgcgggtattgatcttccccacgcatgtgggggtgaaccgggcgcgagcattagagatcgcatttcaacgacatcttccccacgcatgtgggggtgaaccgatgtacatacgaaagatttattacttctctgaatcttccccacgcatgtgggggtgaaccgccagaagggcatttcctcgcgaaagaagggcaatcttccccacgcatgtgggggtgaacctgcatcggcagctcttgaagccccgtgcatcgaatcttccccacgcatgtgggggtgaaccgcccggcttgtgttccgcagggcggatagcatgatcttccccacgcatgtgggggtgaaccgttagacgcttttggcgtgaatcggttgcccggatcttccccacgcatgtgggggtgaaccgaagccgggcccccggcggctcttgtggagccgatcttccccacgcatgtgggggtgaaccgtcccttctatctccgtcgccgctttgccgttgatcttccccacgcatgtgggggtgaacctggatgctgctgaccatgtcaagtcggtgcagtatcttccccacgcatgtgggggtgaacccgcagggagcggcgaggctggttttgggcccgtatcttccccacgcatgtgggggtgaaccgtcgctcccagccagaaagcttgatgatctcatatcttccccacgcatgtgggggtgaaccgtggcgcggcaacggacgggcgccgagtggattatcttccccacgcatgtgggggtgaaccgtagcccgatcgcaagcacttccaattagttcgatcttccccacgcatgtgggggtgaaccagccaagtggacagcgccacggctatcgagaagatcttccccacgcatgtgggggtgaacctagcgcggcacaacttgacattgtggtaaatggatcttccccacgcatgtgggggtgaaccgtgaatggaatggaatcgccaccccacatcgatatcttccccacgcatgtgggggtgaacctagggtaagagggggtacaggggggggaacggggatcttccccacgcatgtgggggtgaacccttttggagggcggtacagtcggagccggatgcatcttccccacgcatgtgggggtgaaccgcggactgagtatcgtagttggaatacgaatatatcttccccacgcatgtgggggtgaacctccacgagtcggcagtccgcggccgaggtgtgaatcttccccacgcatgtgggggtgaaccgccaggatcgcttttggcgggacttctccaggcatcttccccacgcatgtgggggtgaaccgggacgcggcgcagcggcgggccggcctcgcttatcttccccacgcatgtcggggtgaaccgttcaaacgtcccccggatactttagacgtctgatcttccccacgcatgtgggggtgaaccgagaaagcgcataggtcgcctcatccgcctttgatcttccccacgcatgtgggggtgaaccgtccgtaggccgcaaaacgttgacgtctttctaatcttccccacgcatgtgggggtgaaccgttatcggacacagcggcaatgcaaggtttggcatcttccccacgcatgtgggggtgaaccgtggaggcgtcctggcgagtacgtggccggtcgatcttccccacgcatgtgggggtgaaccgttatcggacacagcggcaatgcaaggtttggcatcttccccacgcatgtgggggtgaaccgagccgccgggggattcgggggacacaatacataactcctgggaattcggggaattcgggggacacaatacataactcctgacctgc

SEQ ID NO: 1022 - DNA, 110054 bp, Artificial Sequence
  Synthetic Oligonucleotide
  misc_feature (1)..(98240): n is a, c, g, or t
nnnnnnnnnnnnnnnnnnnnnnnnnnnnnnnnnnnnnnnnnnnnnnnnnnnnnnnnnnnnnnnnnnnnnnnnnnnnnnnnnnnnnnnnnnnnnnnnnnnnnnnnnnnnnnnnnnnnnnnnnnnnnnnnnnnnnnnnnnnnnnnnnnnnnnnnnnnnnnnnnnnnnnnnnnnnnnnnnnnnnnnnnnnnnnnnnnnnnnnnnnnnnnnnnnnnnnnnnnnnnnnnnnnnnnnnnnnnnnnnnnnnnnnnnnnnnnnnnnnnnnnnnnnnnnnnnnnnnnnnnnnnnnnnnnnnnnnnnnnnnnnnnnnnnnnnnnnnnnnnnnnnnnnnnnnnnnnnnnnnnnnnnnnnnnnnnnnnnnnnnnnnnnnnnnnnnnnnnnnnnnnnnnnnnnnnnnnnnnnnnnnnnnnnnnnnnnnnnnnnnnnnnnnnnnnnnnnnnnnnnnnnnnnnnnnnnnnnnnnnnnnnnnnnnnnnnnnnnnnnnnnnnnnnnnnnnnnnnnnnnnnnnnnnnnnnnnnnnnnnnnnnnnnnnnnnnnnnnnnnnnnnnnnnnnnnnnnnnnnnnnnnnnnnnnnnnnnnnnnnnnnnnnnnnnnnnnnnnnnnnnnnnnnnnnnnnnnnnnnnnnnnnnnnnnnnnnnnnnnnnnnnnnnnnnnnnnnnnnnnnnnnnnnnnnnnnnnnnnnnnnnnnnnnnnnnnnnnnnnnnnnnnnnnnnnnnnnnnnnnnnnnnnnnnnnnnnnnnnnnnnnnnnnnnnnnnnnnnnnnnnnnnnnnnnnnnnnnnnnnnnnnnnnnnnnnnnnnnnnnnnnnnnnnnnnnnnnnnnnnnnnnnnnnnnnnnnnnnnnnnnnnnnnnnnnnnnnnnnnnnnnnnnnnnnnnnnnnnnnnnnnnnnnnnnnnnnnnnnnnnnnnnnnnnnnnnnnnnnnnnnnnnnnnnnnnnnnnnnnnnnnnnnnnnnnnnnnnnnnnnnnnnnnnnnnnnnnnnnnnnnnnnnnnnnnnnnnnnnnnnnnnnnnnnnnnnnnnnnnnnnnnnnnnnnnnnnnnnnnnnnnnnnnnnnnnnnnnnnnnnnnnnnnnnnnnnnnnnnnnnnnnnnnnnnnnnnnnnnnnnnnnnnnnnnnnnnnnnnnnnnnnnnnnnnnnnnnnnnnnnnnnnnnnnnnnnnnnnnnnnnnnnnnnnnnnnnnnnnnnnnnnnnnnnnnnnnnnnnnnnnnnnnnnnnnnnnnnnnnnnnnnnnnnnnnnnnnnnnnnnnnnnnnnnnnnnnnnnnnnnnnnnnnnnnnnnnnnnnnnnnnnnnnnnnnnnnnnnnnnnnnnnnnnnnnnnnnnnnnnnnnnnnnnnnnnnnnnnnnnnnnnnnnnnnnnnnnnnnnnnnnnnnnnnnnnnnnnnnnnnnnnnnnnnnnnnnnnnnnnnnnnnnnnnnnnnnnnnnnnnnnnnnnnnnnnnnnnnnnnnnnnnnnnnnnnnnnnnnnnnnnnnnnnnnnnnnnnnnnnnnnnnnnnnnnnnnnnnnnnnnnnnnnnnnnnnnnnnnnnnnnnnnnnnnnnnnnnnnnnnnnnnnnnnnnnnnnnnnnnnnnnnnnnnnnnnnnnnnnnnnnnnnnnnnnnnnnnnnnnnnnnnnnnnnnnnnnnnnnnnnnnnnnnnnnnnnnnnnnnnnnnnnnnnnnnnnnnnnnnnnnnnnnnnnnnnnnnnnnnnnnnnnnnnnnnnnnnnnnnnnnnnnnnnnnnnnnnnnnnnnnnnnnnnnnnnnnnnnnnnnnnnnnnnnnnnnnnnnnnnnnnnnnnnnnnnnnnnnnnnnnnnnnnnnnnnnnnnnnnnnnnnnnnnnnnnnnnnnnnnnnnnnnnnnnnnnnnnnnnnnnnnnnnnnnnnnnnnnnnnnnnnnnnnnnnnnnnnnnnnnnnnnnnnnnnnnnnnnnnnnnnnnnnnnnnnnnnnnnnnnnnnnnnnnnnnnnnnnnnnnnnnnnnnnnnnnnnnnnnnnnnnnnnnnnnnnnnnnnnnnnnnnnnnnnnnnnnnnnnnnnnnnnnnnnnnnnnnnnnnnnnnnnnnnnnnnnnnnnnnnnnnnnnnnnnnnnnnnnnnnnnnnnnnnnnnnnnnnnnnnnnnnnnnnnnnnnnnnnnnnnnnnnnnnnnnnnnnnnnnnnnnnnnnnnnnnnnnnnnnnnnnnnnnnnnnnnnnnnnnnnnnnnnnnnnnnnnnnnnnnnnnnnnnnnnnnnnnnnnnnnnnnnnnnnnnnnnnnnnnnnnnnnnnnnnnnnnnnnnnnnnnnnnnnnnnnnnnnnnnnnnnnnnnnnnnnnnnnnnnnnnnnnnnnnnnnnnnnnnnnnnnnnnnnnnnnnnnnnnnnnnnnnnnnnnnnnnnnnnnnnnnnnnnnnnnnnnnnnnnnnnnnnnnnnnnnnnnnnnnnnnnnnnnnnnnnnnnnnnnnnnnnnnnnnnnnnnnnnnnnnnnnnnnnnnnnnnnnnnnnnnnnnnnnnnnnnnnnnnnnnnnnnnnnnnnnnnnnnnnnnnnnnnnnnnnnnnnnnnnnnnnnnnnnnnnnnnnnnnnnnnnnnnnnnnnnnnnnnnnnnnnnnnnnnnnnnnnnnnnnnnnnnnnnnnnnnnnnnnnnnnnnnnnnnnnnnnnnnnnnnnnnnnnnnnnnnnnnnnnnnnnnnnnnnnnnnnnnnnnnnnnnnnnnnnnnnnnnnnnnnnnnnnnnnnnnnnnnnnnnnnnnnnnnnnnnnnnnnnnnnnnnnnnnnnnnnnnnnnnnnnnnnnnnnnnnnnnnnnnnnnnnnnnnnnnnnnnnnnnnnnnnnnnnnnnnnnnnnnnnnnnnnnnnnnnnnnnnnnnnnnnnnnnnnnnnnnnnnnnnnnnnnnnnnnnnnnnnnnnnnnnnnnnnnnnnnnnnnnnnnnnnnnnnnnnnnnnnnnnnnnnnnnnnnnnnnnnnnnnnnnnnnnnnnnnnnnnnnnnnnnnnnnnnnnnnnnnnnnnnnnnnnnnnnnnnnnnnnnnnnnnnnnnnnnnnnnnnnnnnnnnnnnnnnnnnnnnnnnnnnnnnnnnnnnnnnnnnnnnnnnnnnnnnnnnnnnnnnnnnnnnnnnnnnnnnnnnnnnnnnnnnnnnnnnnnnnnnnnnnnnnnnnnnnnnnnnnnnnnnnnnnnnnnnnnnnnnnnnnnnnnnnnnnnnnnnnnnnnnnnnnnnnnnnnnnnnnnnnnnnnnnnnnnnnnnnnnnnnnnnnnnnnnnnnnnnnnnnnnnnnnnnnnnnnnnnnnnnnnnnnnnnnnnnnnnnnnnnnnnnnnnnnnnnnnnnnnnnnnnnnnnnnnnnnnnnnnnnnnnnnnnnnnnnnnnnnnnnnnnnnnnnnnnnnnnnnnnnnnnnnnnnnnnnnnnnnnnnnnnnnnnnnnnnnnnnnnnnnnnnnnnnnnnnnnnnnnnnnnnnnnnnnnnnnnnnnnnnnnnnnnnnnnnnnnnnnnnnnnnnnnnnnnnnnnnnnnnnnnnnnnnnnnnnnnnnnnnnnnnnnnnnnnnnnnnnnnnnnnnnnnnnnnnnnnnnnnnnnnnnnnnnnnnnnnnnnnnnnnnnnnnnnnnnnnnnnnnnnnnnnnnnnnnnnnnnnnnnnnnnnnnnnnnnnnnnnnnnnnnnnnnnnnnnnnnnnnnnnnnnnnnnnnnnnnnnnnnnnnnnnnnnnnnnnnnnnnnnnnnnnnnnnnnnnnnnnnnnnnnnnnnnnnnnnnnnnnnnnnnnnnnnnnnnnnnnnnnnnnnnnnnnnnnnnnnnnnnnnnnnnnnnnnnnnnnnnnnnnnnnnnnnnnnnnnnnnnnnnnnnnnnnnnnnnnnnnnnnnnnnnnnnnnnnnnnnnnnnnnnnnnnnnnnnnnnnnnnnnnnnnnnnnnnnnnnnnnnnnnnnnnnnnnnnnnnnnnnnnnnnnnnnnnnnnnnnnnnnnnnnnnnnnnnnnnnnnnnnnnnnnnnnnnnnnnnnnnnnnnnnnnnnnnnnnnnnnnnnnnnnnnnnnnnnnnnnnnnnnnnnnnnnnnnnnnnnnnnnnnnnnnnnnnnnnnnnnnnnnnnnnnnnnnnnnnnnnnnnnnnnnnnnnnnnnnnnnnnnnnnnnnnnnnnnnnnnnnnnnnnnnnnnnnnnnnnnnnnnnnnnnnnnnnnnnnnnnnnnnnnnnnnnnnnnnnnnnnnnnnnnnnnnnnnnnnnnnnnnnnnnnnnnnnnnnnnnnnnnnnnnnnnnnnnnnnnnnnnnnnnnnnnnnnnnnnnnnnnnnnnnnnnnnnnnnnnnnnnnnnnnnnnnnnnnnnnnnnnnnnnnnnnnnnnnnnnnnnnnnnnnnnnnnnnnnnnnnnnnnnnnnnnnnnnnnnnnnnnnnnnnnnnnnnnnnnnnnnnnnnnnnnnnnnnnnnnnnnnnnnnnnnnnnnnnnnnnnnnnnnnnnnnnnnnnnnnnnnnnnnnnnnnnnnnnnnnnnnnnnnnnnnnnnnnnnnnnnnnnnnnnnnnnnnnnnnnnnnnnnnnnnnnnnnnnnnnnnnnnnnnnnnnnnnnnnnnnnnnnnnnnnnnnnnnnnnnnnnnnnnnnnnnnnnnnnnnnnnnnnnnnnnnnnnnnnnnnnnnnnnnnnnnnnnnnnnnnnnnnnnnnnnnnnnnnnnnnnnnnnnnnnnnnnnnnnnnnnnnnnnnnnnnnnnnnnnnnnnnnnnnnnnnnnnnnnnnnnnnnnnnnnnnnnnnnnnnnnnnnnnnnnnnnnnnnnnnnnnnnnnnnnnnnnnnnnnnnnnnnnnnnnnnnnnnnnnnnnnnnnnnnnnnnnnnnnnnnnnnnnnnnnnnnnnnnnnnnnnnnnnnnnnnnnnnnnnnnnnnnnnnnnnnnnnnnnnnnnnnnnnnnnnnnnnnnnnnnnnnnnnnnnnnnnnnnnnnnnnnnnnnnnnnnnnnnnnnnnnnnnnnnnnnnnnnnnnnnnnnnnnnnnnnnnnnnnnnnnnnnnnnnnnnnnnnnnnnnnnnnnnnnnnnnnnnnnnnnnnnnnnnnnnnnnnnnnnnnnnnnnnnnnnnnnnnnnnnnnnnnnnnnnnnnnnnnnnnnnnnnnnnnnnnnnnnnnnnnnnnnnnnnnnnnnnnnnnnnnnnnnnnnnnnnnnnnnnnnnnnnnnnnnnnnnnnnnnnnnnnnnnnnnnnnnnnnnnnnnnnnnnnnnnnnnnnnnnnnnnnnnnnnnnnnnnnnnnnnnnnnnnnnnnnnnnnnnnnnnnnnnnnnnnnnnnnnnnnnnnnnnnnnnnnnnnnnnnnnnnnnnnnnnnnnnnnnnnnnnnnnnnnnnnnnnnnnnnnnnnnnnnnnnnnnnnnnnnnnnnnnnnnnnnnnnnnnnnnnnnnnnnnnnnnnnnnnnnnnnnnnnnnnnnnnnnnnnnnnnnnnnnnnnnnnnnnnnnnnnnnnnnnnnnnnnnnnnnnnnnnnnnnnnnnnnnnnnnnnnnnnnnnnnnnnnnnnnnnnnnnnnnnnnnnnnnnnnnnnnnnnnnnnnnnnnnnnnnnnnnnnnnnnnnnnnnnnnnnnnnnnnnnnnnnnnnnnnnnnnnnnnnnnnnnnnnnnnnnnnnnnnnnnnnnnnnnnnnnnnnnnnnnnnnnnnnnnnnnnnnnnnnnnnnnnnnnnnnnnnnnnnnnnnnnnnnnnnnnnnnnnnnnnnnnnnnnnnnnnnnnnnnnnnnnnnnnnnnnnnnnnnnnnnnnnnnnnnnnnnnnnnnnnnnnnnnnnnnnnnnnnnnnnnnnnnnnnnnnnnnnnnnnnnnnnnnnnnnnnnnnnnnnnnnnnnnnnnnnnnnnnnnnnnnnnnnnnnnnnnnnnnnnnnnnnnnnnnnnnnnnnnnnnnnnnnnnnnnnnnnnnnnnnnnnnnnnnnnnnnnnnnnnnnnnnnnnnnnnnnnnnnnnnnnnnnnnnnnnnnnnnnnnnnnnnnnnnnnnnnnnnnnnnnnnnnnnnnnnnnnnnnnnnnnnnnnnnnnnnnnnnnnnnnnnnnnnnnnnnnnnnnnnnnnnnnnnnnnnnnnnnnnnnnnnnnnnnnnnnnnnnnnnnnnnnnnnnnnnnnnnnnnnnnnnnnnnnnnnnnnnnnnnnnnnnnnnnnnnnnnnnnnnnnnnnnnnnnnnnnnnnnnnnnnnnnnnnnnnnnnnnnnnnnnnnnnnnnnnnnnnnnnnnnnnnnnnnnnnnnnnnnnnnnnnnnnnnnnnnnnnnnnnnnnnnnnnnnnnnnnnnnnnnnnnnnnnnnnnnnnnnnnnnnnnnnnnnnnnnnnnnnnnnnnnnnnnnnnnnnnnnnnnnnnnnnnnnnnnnnnnnnnnnnnnnnnnnnnnnnnnnnnnnnnnnnnnnnnnnnnnnnnnnnnnnnnnnnnnnnnnnnnnnnnnnnnnnnnnnnnnnnnnnnnnnnnnnnnnnnnnnnnnnnnnnnnnnnnnnnnnnnnnnnnnnnnnnnnnnnnnnnnnnnnnnnnnnnnnnnnnnnnnnnnnnnnnnnnnnnnnnnnnnnnnnnnnnnnnnnnnnnnnnnnnnnnnnnnnnnnnnnnnnnnnnnnnnnnnnnnnnnnnnnnnnnnnnnnnnnnnnnnnnnnnnnnnnnnnnnnnnnnnnnnnnnnnnnnnnnnnnnnnnnnnnnnnnnnnnnnnnnnnnnnnnnnnnnnnnnnnnnnnnnnnnnnnnnnnnnnnnnnnnnnnnnnnnnnnnnnnnnnnnnnnnnnnnnnnnnnnnnnnnnnnnnnnnnnnnnnnnnnnnnnnnnnnnnnnnnnnnnnnnnnnnnnnnnnnnnnnnnnnnnnnnnnnnnnnnnnnnnnnnnnnnnnnnnnnnnnnnnnnnnnnnnnnnnnnnnnnnnnnnnnnnnnnnnnnnnnnnnnnnnnnnnnnnnnnnnnnnnnnnnnnnnnnnnnnnnnnnnnnnnnnnnnnnnnnnnnnnnnnnnnnnnnnnnnnnnnnnnnnnnnnnnnnnnnnnnnnnnnnnnnnnnnnnnnnnnnnnnnnnnnnnnnnnnnnnnnnnnnnnnnnnnnnnnnnnnnnnnnnnnnnnnnnnnnnnnnnnnnnnnnnnnnnnnnnnnnnnnnnnnnnnnnnnnnnnnnnnnnnnnnnnnnnnnnnnnnnnnnnnnnnnnnnnnnnnnnnnnnnnnnnnnnnnnnnnnnnnnnnnnnnnnnnnnnnnnnnnnnnnnnnnnnnnnnnnnnnnnnnnnnnnnnnnnnnnnnnnnnnnnnnnnnnnnnnnnnnnnnnnnnnnnnnnnnnnnnnnnnnnnnnnnnnnnnnnnnnnnnnnnnnnnnnnnnnnnnnnnnnnnnnnnnnnnnnnnnnnnnnnnnnnnnnnnnnnnnnnnnnnnnnnnnnnnnnnnnnnnnnnnnnnnnnnnnnnnnnnnnnnnnnnnnnnnnnnnnnnnnnnnnnnnnnnnnnnnnnnnnnnnnnnnnnnnnnnnnnnnnnnnnnnnnnnnnnnnnnnnnnnnnnnnnnnnnnnnnnnnnnnnnnnnnnnnnnnnnnnnnnnnnnnnnnnnnnnnnnnnnnnnnnnnnnnnnnnnnnnnnnnnnnnnnnnnnnnnnnnnnnnnnnnnnnnnnnnnnnnnnnnnnnnnnnnnnnnnnnnnnnnnnnnnnnnnnnnnnnnnnnnnnnnnnnnnnnnnnnnnnnnnnnnnnnnnnnnnnnnnnnnnnnnnnnnnnnnnnnnnnnnnnnnnnnnnnnnnnnnnnnnnnnnnnnnnnnnnnnnnnnnnnnnnnnnnnnnnnnnnnnnnnnnnnnnnnnnnnnnnnnnnnnnnnnnnnnnnnnnnnnnnnnnnnnnnnnnnnnnnnnnnnnnnnnnnnnnnnnnnnnnnnnnnnnnnnnnnnnnnnnnnnnnnnnnnnnnnnnnnnnnnnnnnnnnnnnnnnnnnnnnnnnnnnnnnnnnnnnnnnnnnnnnnnnnnnnnnnnnnnnnnnnnnnnnnnnnnnnnnnnnnnnnnnnnnnnnnnnnnnnnnnnnnnnnnnnnnnnnnnnnnnnnnnnnnnnnnnnnnnnnnnnnnnnnnnnnnnnnnnnnnnnnnnnnnnnnnnnnnnnnnnnnnnnnnnnnnnnnnnnnnnnnnnnnnnnnnnnnnnnnnnnnnnnnnnnnnnnnnnnnnnnnnnnnnnnnnnnnnnnnnnnnnnnnnnnnnnnnnnnnnnnnnnnnnnnnnnnnnnnnnnnnnnnnnnnnnnnnnnnnnnnnnnnnnnnnnnnnnnnnnnnnnnnnnnnnnnnnnnnnnnnnnnnnnnnnnnnnnnnnnnnnnnnnnnnnnnnnnnnnnnnnnnnnnnnnnnnnnnnnnnnnnnnnnnnnnnnnnnnnnnnnnnnnnnnnnnnnnnnnnnnnnnnnnnnnnnnnnnnnnnnnnnnnnnnnnnnnnnnnnnnnnnnnnnnnnnnnnnnnnnnnnnnnnnnnnnnnnnnnnnnnnnnnnnnnnnnnnnnnnnnnnnnnnnnnnnnnnnnnnnnnnnnnnnnnnnnnnnnnnnnnnnnnnnnnnnnnnnnnnnnnnnnnnnnnnnnnnnnnnnnnnnnnnnnnnnnnnnnnnnnnnnnnnnnnnnnnnnnnnnnnnnnnnnnnnnnnnnnnnnnnnnnnnnnnnnnnnnnnnnnnnnnnnnnnnnnnnnnnnnnnnnnnnnnnnnnnnnnnnnnnnnnnnnnnnnnnnnnnnnnnnnnnnnnnnnnnnnnnnnnnnnnnnnnnnnnnnnnnnnnnnnnnnnnnnnnnnnnnnnnnnnnnnnnnnnnnnnnnnnnnnnnnnnnnnnnnnnnnnnnnnnnnnnnnnnnnnnnnnnnnnnnnnnnnnnnnnnnnnnnnnnnnnnnnnnnnnnnnnnnnnnnnnnnnnnnnnnnnnnnnnnnnnnnnnnnnnnnnnnnnnnnnnnnnnnnnnnnnnnnnnnnnnnnnnnnnnnnnnnnnnnnnnnnnnnnnnnnnnnnnnnnnnnnnnnnnnnnnnnnnnnnnnnnnnnnnnnnnnnnnnnnnnnnnnnnnnnnnnnnnnnnnnnnnnnnnnnnnnnnnnnnnnnnnnnnnnnnnnnnnnnnnnnnnnnnnnnnnnnnnnnnnnnnnnnnnnnnnnnnnnnnnnnnnnnnnnnnnnnnnnnnnnnnnnnnnnnnnnnnnnnnnnnnnnnnnnnnnnnnnnnnnnnnnnnnnnnnnnnnnnnnnnnnnnnnnnnnnnnnnnnnnnnnnnnnnnnnnnnnnnnnnnnnnnnnnnnnnnnnnnnnnnnnnnnnnnnnnnnnnnnnnnnnnnnnnnnnnnnnnnnnnnnnnnnnnnnnnnnnnnnnnnnnnnnnnnnnnnnnnnnnnnnnnnnnnnnnnnnnnnnnnnnnnnnnnnnnnnnnnnnnnnnnnnnnnnnnnnnnnnnnnnnnnnnnnnnnnnnnnnnnnnnnnnnnnnnnnnnnnnnnnnnnnnnnnnnnnnnnnnnnnnnnnnnnnnnnnnnnnnnnnnnnnnnnnnnnnnnnnnnnnnnnnnnnnnnnnnnnnnnnnnnnnnnnnnnnnnnnnnnnnnnnnnnnnnnnnnnnnnnnnnnnnnnnnnnnnnnnnnnnnnnnnnnnnnnnnnnnnnnnnnnnnnnnnnnnnnnnnnnnnnnnnnnnnnnnnnnnnnnnnnnnnnnnnnnnnnnnnnnnnnnnnnnnnnnnnnnnnnnnnnnnnnnnnnnnnnnnnnnnnnnnnnnnnnnnnnnnnnnnnnnnnnnnnnnnnnnnnnnnnnnnnnnnnnnnnnnnnnnnnnnnnnnnnnnnnnnnnnnnnnnnnnnnnnnnnnnnnnnnnnnnnnnnnnnnnnnnnnnnnnnnnnnnnnnnnnnnnnnnnnnnnnnnnnnnnnnnnnnnnnnnnnnnnnnnnnnnnnnnnnnnnnnnnnnnnnnnnnnnnnnnnnnnnnnnnnnnnnnnnnnnnnnnnnnnnnnnnnnnnnnnnnnnnnnnnnnnnnnnnnnnnnnnnnnnnnnnnnnnnnnnnnnnnnnnnnnnnnnnnnnnnnnnnnnnnnnnnnnnnnnnnnnnnnnnnnnnnnnnnnnnnnnnnnnnnnnnnnnnnnnnnnnnnnnnnnnnnnnnnnnnnnnnnnnnnnnnnnnnnnnnnnnnnnnnnnnnnnnnnnnnnnnnnnnnnnnnnnnnnnnnnnnnnnnnnnnnnnnnnnnnnnnnnnnnnnnnnnnnnnnnnnnnnnnnnnnnnnnnnnnnnnnnnnnnnnnnnnnnnnnnnnnnnnnnnnnnnnnnnnnnnnnnnnnnnnnnnnnnnnnnnnnnnnnnnnnnnnnnnnnnnnnnnnnnnnnnnnnnnnnnnnnnnnnnnnnnnnnnnnnnnnnnnnnnnnnnnnnnnnnnnnnnnnnnnnnnnnnnnnnnnnnnnnnnnnnnnnnnnnnnnnnnnnnnnnnnnnnnnnnnnnnnnnnnnnnnnnnnnnnnnnnnnnnnnnnnnnnnnnnnnnnnnnnnnnnnnnnnnnnnnnnnnnnnnnnnnnnnnnnnnnnnnnnnnnnnnnnnnnnnnnnnnnnnnnnnnnnnnnnnnnnnnnnnnnnnnnnnnnnnnnnnnnnnnnnnnnnnnnnnnnnnnnnnnnnnnnnnnnnnnnnnnnnnnnnnnnnnnnnnnnnnnnnnnnnnnnnnnnnnnnnnnnnnnnnnnnnnnnnnnnnnnnnnnnnnnnnnnnnnnnnnnnnnnnnnnnnnnnnnnnnnnnnnnnnnnnnnnnnnnnnnnnnnnnnnnnnnnnnnnnnnnnnnnnnnnnnnnnnnnnnnnnnnnnnnnnnnnnnnnnnnnnnnnnnnnnnnnnnnnnnnnnnnnnnnnnnnnnnnnnnnnnnnnnnnnnnnnnnnnnnnnnnnnnnnnnnnnnnnnnnnnnnnnnnnnnnnnnnnnnnnnnnnnnnnnnnnnnnnnnnnnnnnnnnnnnnnnnnnnnnnnnnnnnnnnnnnnnnnnnnnnnnnnnnnnnnnnnnnnnnnnnnnnnnnnnnnnnnnnnnnnnnnnnnnnnnnnnnnnnnnnnnnnnnnnnnnnnnnnnnnnnnnnnnnnnnnnnnnnnnnnnnnnnnnnnnnnnnnnnnnnnnnnnnnnnnnnnnnnnnnnnnnnnnnnnnnnnnnnnnnnnnnnnnnnnnnnnnnnnnnnnnnnnnnnnnnnnnnnnnnnnnnnnnnnnnnnnnnnnnnnnnnnnnnnnnnnnnnnnnnnnnnnnnnnnnnnnnnnnnnnnnnnnnnnnnnnnnnnnnnnnnnnnnnnnnnnnnnnnnnnnnnnnnnnnnnnnnnnnnnnnnnnnnnnnnnnnnnnnnnnnnnnnnnnnnnnnnnnnnnnnnnnnnnnnnnnnnnnnnnnnnnnnnnnnnnnnnnnnnnnnnnnnnnnnnnnnnnnnnnnnnnnnnnnnnnnnnnnnnnnnnnnnnnnnnnnnnnnnnnnnnnnnnnnnnnnnnnnnnnnnnnnnnnnnnnnnnnnnnnnnnnnnnnnnnnnnnnnnnnnnnnnnnnnnnnnnnnnnnnnnnnnnnnnnnnnnnnnnnnnnnnnnnnnnnnnnnnnnnnnnnnnnnnnnnnnnnnnnnnnnnnnnnnnnnnnnnnnnnnnnnnnnnnnnnnnnnnnnnnnnnnnnnnnnnnnnnnnnnnnnnnnnnnnnnnnnnnnnnnnnnnnnnnnnnnnnnnnnnnnnnnnnnnnnnnnnnnnnnnnnnnnnnnnnnnnnnnnnnnnnnnnnnnnnnnnnnnnnnnnnnnnnnnnnnnnnnnnnnnnnnnnnnnnnnnnnnnnnnnnnnnnnnnnnnnnnnnnnnnnnnnnnnnnnnnnnnnnnnnnnnnnnnnnnnnnnnnnnnnnnnnnnnnnnnnnnnnnnnnnnnnnnnnnnnnnnnnnnnnnnnnnnnnnnnnnnnnnnnnnnnnnnnnnnnnnnnnnnnnnnnnnnnnnnnnnnnnnnnnnnnnnnnnnnnnnnnnnnnnnnnnnnnnnnnnnnnnnnnnnnnnnnnnnnnnnnnnnnnnnnnnnnnnnnnnnnnnnnnnnnnnnnnnnnnnnnnnnnnnnnnnnnnnnnnnnnnnnnnnnnnnnnnnnnnnnnnnnnnnnnnnnnnnnnnnnnnnnnnnnnnnnnnnnnnnnnnnnnnnnnnnnnnnnnnnnnnnnnnnnnnnnnnnnnnnnnnnnnnnnnnnnnnnnnnnnnnnnnnnnnnnnnnnnnnnnnnnnnnnnnnnnnnnnnnnnnnnnnnnnnnnnnnnnnnnnnnnnnnnnnnnnnnnnnnnnnnnnnnnnnnnnnnnnnnnnnnnnnnnnnnnnnnnnnnnnnnnnnnnnnnnnnnnnnnnnnnnnnnnnnnnnnnnnnnnnnnnnnnnnnnnnnnnnnnnnnnnnnnnnnnnnnnnnnnnnnnnnnnnnnnnnnnnnnnnnnnnnnnnnnnnnnnnnnnnnnnnnnnnnnnnnnnnnnnnnnnnnnnnnnnnnnnnnnnnnnnnnnnnnnnnnnnnnnnnnnnnnnnnnnnnnnnnnnnnnnnnnnnnnnnnnnnnnnnnnnnnnnnnnnnnnnnnnnnnnnnnnnnnnnnnnnnnnnnnnnnnnnnnnnnnnnnnnnnnnnnnnnnnnnnnnnnnnnnnnnnnnnnnnnnnnnnnnnnnnnnnnnnnnnnnnnnnnnnnnnnnnnnnnnnnnnnnnnnnnnnnnnnnnnnnnnnnnnnnnnnnnnnnnnnnnnnnnnnnnnnnnnnnnnnnnnnnnnnnnnnnnnnnnnnnnnnnnnnnnnnnnnnnnnnnnnnnnnnnnnnnnnnnnnnnnnnnnnnnnnnnnnnnnnnnnnnnnnnnnnnnnnnnnnnnnnnnnnnnnnnnnnnnnnnnnnnnnnnnnnnnnnnnnnnnnnnnnnnnnnnnnnnnnnnnnnnnnnnnnnnnnnnnnnnnnnnnnnnnnnnnnnnnnnnnnnnnnnnnnnnnnnnnnnnnnnnnnnnnnnnnnnnnnnnnnnnnnnnnnnnnnnnnnnnnnnnnnnnnnnnnnnnnnnnnnnnnnnnnnnnnnnnnnnnnnnnnnnnnnnnnnnnnnnnnnnnnnnnnnnnnnnnnnnnnnnnnnnnnnnnnnnnnnnnnnnnnnnnnnnnnnnnnnnnnnnnnnnnnnnnnnnnnnnnnnnnnnnnnnnnnnnnnnnnnnnnnnnnnnnnnnnnnnnnnnnnnnnnnnnnnnnnnnnnnnnnnnnnnnnnnnnnnnnnnnnnnnnnnnnnnnnnnnnnnnnnnnnnnnnnnnnnnnnnnnnnnnnnnnnnnnnnnnnnnnnnnnnnnnnnnnnnnnnnnnnnnnnnnnnnnnnnnnnnnnnnnnnnnnnnnnnnnnnnnnnnnnnnnnnnnnnnnnnnnnnnnnnnnnnnnnnnnnnnnnnnnnnnnnnnnnnnnnnnnnnnnnnnnnnnnnnnnnnnnnnnnnnnnnnnnnnnnnnnnnnnnnnnnnnnnnnnnnnnnnnnnnnnnnnnnnnnnnnnnnnnnnnnnnnnnnnnnnnnnnnnnnnnnnnnnnnnnnnnnnnnnnnnnnnnnnnnnnnnnnnnnnnnnnnnnnnnnnnnnnnnnnnnnnnnnnnnnnnnnnnnnnnnnnnnnnnnnnnnnnnnnnnnnnnnnnnnnnnnnnnnnnnnnnnnnnnnnnnnnnnnnnnnnnnnnnnnnnnnnnnnnnnnnnnnnnnnnnnnnnnnnnnnnnnnnnnnnnnnnnnnnnnnnnnnnnnnnnnnnnnnnnnnnnnnnnnnnnnnnnnnnnnnnnnnnnnnnnnnnnnnnnnnnnnnnnnnnnnnnnnnnnnnnnnnnnnnnnnnnnnnnnnnnnnnnnnnnnnnnnnnnnnnnnnnnnnnnnnnnnnnnnnnnnnnnnnnnnnnnnnnnnnnnnnnnnnnnnnnnnnnnnnnnnnnnnnnnnnnnnnnnnnnnnnnnnnnnnnnnnnnnnnnnnnnnnnnnnnnnnnnnnnnnnnnnnnnnnnnnnnnnnnnnnnnnnnnnnnnnnnnnnnnnnnnnnnnnnnnnnnnnnnnnnnnnnnnnnnnnnnnnnnnnnnnnnnnnnnnnnnnnnnnnnnnnnnnnnnnnnnnnnnnnnnnnnnnnnnnnnnnnnnnnnnnnnnnnnnnnnnnnnnnnnnnnnnnnnnnnnnnnnnnnnnnnnnnnnnnnnnnnnnnnnnnnnnnnnnnnnnnnnnnnnnnnnnnnnnnnnnnnnnnnnnnnnnnnnnnnnnnnnnnnnnnnnnnnnnnnnnnnnnnnnnnnnnnnnnnnnnnnnnnnnnnnnnnnnnnnnnnnnnnnnnnnnnnnnnnnnnnnnnnnnnnnnnnnnnnnnnnnnnnnnnnnnnnnnnnnnnnnnnnnnnnnnnnnnnnnnnnnnnnnnnnnnnnnnnnnnnnnnnnnnnnnnnnnnnnnnnnnnnnnnnnnnnnnnnnnnnnnnnnnnnnnnnnnnnnnnnnnnnnnnnnnnnnnnnnnnnnnnnnnnnnnnnnnnnnnnnnnnnnnnnnnnnnnnnnnnnnnnnnnnnnnnnnnnnnnnnnnnnnnnnnnnnnnnnnnnnnnnnnnnnnnnnnnnnnnnnnnnnnnnnnnnnnnnnnnnnnnnnnnnnnnnnnnnnnnnnnnnnnnnnnnnnnnnnnnnnnnnnnnnnnnnnnnnnnnnnnnnnnnnnnnnnnnnnnnnnnnnnnnnnnnnnnnnnnnnnnnnnnnnnnnnnnnnnnnnnnnnnnnnnnnnnnnnnnnnnnnnnnnnnnnnnnnnnnnnnnnnnnnnnnnnnnnnnnnnnnnnnnnnnnnnnnnnnnnnnnnnnnnnnnnnnnnnnnnnnnnnnnnnnnnnnnnnnnnnnnnnnnnnnnnnnnnnnnnnnnnnnnnnnnnnnnnnnnnnnnnnnnnnnnnnnnnnnnnnnnnnnnnnnnnnnnnnnnnnnnnnnnnnnnnnnnnnnnnnnnnnnnnnnnnnnnnnnnnnnnnnnnnnnnnnnnnnnnnnnnnnnnnnnnnnnnnnnnnnnnnnnnnnnnnnnnnnnnnnnnnnnnnnnnnnnnnnnnnnnnnnnnnnnnnnnnnnnnnnnnnnnnnnnnnnnnnnnnnnnnnnnnnnnnnnnnnnnnnnnnnnnnnnnnnnnnnnnnnnnnnnnnnnnnnnnnnnnnnnnnnnnnnnnnnnnnnnnnnnnnnnnnnnnnnnnnnnnnnnnnnnnnnnnnnnnnnnnnnnnnnnnnnnnnnnnnnnnnnnnnnnnnnnnnnnnnnnnnnnnnnnnnnnnnnnnnnnnnnnnnnnnnnnnnnnnnnnnnnnnnnnnnnnnnnnnnnnnnnnnnnnnnnnnnnnnnnnnnnnnnnnnnnnnnnnnnnnnnnnnnnnnnnnnnnnnnnnnnnnnnnnnnnnnnnnnnnnnnnnnnnnnnnnnnnnnnnnnnnnnnnnnnnnnnnnnnnnnnnnnnnnnnnnnnnnnnnnnnnnnnnnnnnnnnnnnnnnnnnnnnnnnnnnnnnnnnnnnnnnnnnnnnnnnnnnnnnnnnnnnnnnnnnnnnnnnnnnnnnnnnnnnnnnnnnnnnnnnnnnnnnnnnnnnnnnnnnnnnnnnnnnnnnnnnnnnnnnnnnnnnnnnnnnnnnnnnnnnnnnnnnnnnnnnnnnnnnnnnnnnnnnnnnnnnnnnnnnnnnnnnnnnnnnnnnnnnnnnnnnnnnnnnnnnnnnnnnnnnnnnnnnnnnnnnnnnnnnnnnnnnnnnnnnnnnnnnnnnnnnnnnnnnnnnnnnnnnnnnnnnnnnnnnnnnnnnnnnnnnnnnnnnnnnnnnnnnnnnnnnnnnnnnnnnnnnnnnnnnnnnnnnnnnnnnnnnnnnnnnnnnnnnnnnnnnnnnnnnnnnnnnnnnnnnnnnnnnnnnnnnnnnnnnnnnnnnnnnnnnnnnnnnnnnnnnnnnnnnnnnnnnnnnnnnnnnnnnnnnnnnnnnnnnnnnnnnnnnnnnnnnnnnnnnnnnnnnnnnnnnnnnnnnnnnnnnnnnnnnnnnnnnnnnnnnnnnnnnnnnnnnnnnnnnnnnnnnnnnnnnnnnnnnnnnnnnnnnnnnnnnnnnnnnnnnnnnnnnnnnnnnnnnnnnnnnnnnnnnnnnnnnnnnnnnnnnnnnnnnnnnnnnnnnnnnnnnnnnnnnnnnnnnnnnnnnnnnnnnnnnnnnnnnnnnnnnnnnnnnnnnnnnnnnnnnnnnnnnnnnnnnnnnnnnnnnnnnnnnnnnnnnnnnnnnnnnnnnnnnnnnnnnnnnnnnnnnnnnnnnnnnnnnnnnnnnnnnnnnnnnnnnnnnnnnnnnnnnnnnnnnnnnnnnnnnnnnnnnnnnnnnnnnnnnnnnnnnnnnnnnnnnnnnnnnnnnnnnnnnnnnnnnnnnnnnnnnnnnnnnnnnnnnnnnnnnnnnnnnnnnnnnnnnnnnnnnnnnnnnnnnnnnnnnnnnnnnnnnnnnnnnnnnnnnnnnnnnnnnnnnnnnnnnnnnnnnnnnnnnnnnnnnnnnnnnnnnnnnnnnnnnnnnnnnnnnnnnnnnnnnnnnnnnnnnnnnnnnnnnnnnnnnnnnnnnnnnnnnnnnnnnnnnnnnnnnnnnnnnnnnnnnnnnnnnnnnnnnnnnnnnnnnnnnnnnnnnnnnnnnnnnnnnnnnnnnnnnnnnnnnnnnnnnnnnnnnnnnnnnnnnnnnnnnnnnnnnnnnnnnnnnnnnnnnnnnnnnnnnnnnnnnnnnnnnnnnnnnnnnnnnnnnnnnnnnnnnnnnnnnnnnnnnnnnnnnnnnnnnnnnnnnnnnnnnnnnnnnnnnnnnnnnnnnnnnnnnnnnnnnnnnnnnnnnnnnnnnnnnnnnnnnnnnnnnnnnnnnnnnnnnnnnnnnnnnnnnnnnnnnnnnnnnnnnnnnnnnnnnnnnnnnnnnnnnnnnnnnnnnnnnnnnnnnnnnnnnnnnnnnnnnnnnnnnnnnnnnnnnnnnnnnnnnnnnnnnnnnnnnnnnnnnnnnnnnnnnnnnnnnnnnnnnnnnnnnnnnnnnnnnnnnnnnnnnnnnnnnnnnnnnnnnnnnnnnnnnnnnnnnnnnnnnnnnnnnnnnnnnnnnnnnnnnnnnnnnnnnnnnnnnnnnnnnnnnnnnnnnnnnnnnnnnnnnnnnnnnnnnnnnnnnnnnnnnnnnnnnnnnnnnnnnnnnnnnnnnnnnnnnnnnnnnnnnnnnnnnnnnnnnnnnnnnnnnnnnnnnnnnnnnnnnnnnnnnnnnnnnnnnnnnnnnnnnnnnnnnnnnnnnnnnnnnnnnnnnnnnnnnnnnnnnnnnnnnnnnnnnnnnnnnnnnnnnnnnnnnnnnnnnnnnnnnnnnnnnnnnnnnnnnnnnnnnnnnnnnnnnnnnnnnnnnnnnnnnnnnnnnnnnnnnnnnnnnnnnnnnnnnnnnnnnnnnnnnnnnnnnnnnnnnnnnnnnnnnnnnnnnnnnnnnnnnnnnnnnnnnnnnnnnnnnnnnnnnnnnnnnnnnnnnnnnnnnnnnnnnnnnnnnnnnnnnnnnnnnnnnnnnnnnnnnnnnnnnnnnnnnnnnnnnnnnnnnnnnnnnnnnnnnnnnnnnnnnnnnnnnnnnnnnnnnnnnnnnnnnnnnnnnnnnnnnnnnnnnnnnnnnnnnnnnnnnnnnnnnnnnnnnnnnnnnnnnnnnnnnnnnnnnnnnnnnnnnnnnnnnnnnnnnnnnnnnnnnnnnnnnnnnnnnnnnnnnnnnnnnnnnnnnnnnnnnnnnnnnnnnnnnnnnnnnnnnnnnnnnnnnnnnnnnnnnnnnnnnnnnnnnnnnnnnnnnnnnnnnnnnnnnnnnnnnnnnnnnnnnnnnnnnnnnnnnnnnnnnnnnnnnnnnnnnnnnnnnnnnnnnnnnnnnnnnnnnnnnnnnnnnnnnnnnnnnnnnnnnnnnnnnnnnnnnnnnnnnnnnnnnnnnnnnnnnnnnnnnnnnnnnnnnnnnnnnnnnnnnnnnnnnnnnnnnnnnnnnnnnnnnnnnnnnnnnnnnnnnnnnnnnnnnnnnnnnnnnnnnnnnnnnnnnnnnnnnnnnnnnnnnnnnnnnnnnnnnnnnnnnnnnnnnnnnnnnnnnnnnnnnnnnnnnnnnnnnnnnnnnnnnnnnnnnnnnnnnnnnnnnnnnnnnnnnnnnnnnnnnnnnnnnnnnnnnnnnnnnnnnnnnnnnnnnnnnnnnnnnnnnnnnnnnnnnnnnnnnnnnnnnnnnnnnnnnnnnnnnnnnnnnnnnnnnnnnnnnnnnnnnnnnnnnnnnnnnnnnnnnnnnnnnnnnnnnnnnnnnnnnnnnnnnnnnnnnnnnnnnnnnnnnnnnnnnnnnnnnnnnnnnnnnnnnnnnnnnnnnnnnnnnnnnnnnnnnnnnnnnnnnnnnnnnnnnnnnnnnnnnnnnnnnnnnnnnnnnnnnnnnnnnnnnnnnnnnnnnnnnnnnnnnnnnnnnnnnnnnnnnnnnnnnnnnnnnnnnnnnnnnnnnnnnnnnnnnnnnnnnnnnnnnnnnnnnnnnnnnnnnnnnnnnnnnnnnnnnnnnnnnnnnnnnnnnnnnnnnnnnnnnnnnnnnnnnnnnnnnnnnnnnnnnnnnnnnnnnnnnnnnnnnnnnnnnnnnnnnnnnnnnnnnnnnnnnnnnnnnnnnnnnnnnnnnnnnnnnnnnnnnnnnnnnnnnnnnnnnnnnnnnnnnnnnnnnnnnnnnnnnnnnnnnnnnnnnnnnnnnnnnnnnnnnnnnnnnnnnnnnnnnnnnnnnnnnnnnnnnnnnnnnnnnnnnnnnnnnnnnnnnnnnnnnnnnnnnnnnnnnnnnnnnnnnnnnnnnnnnnnnnnnnnnnnnnnnnnnnnnnnnnnnnnnnnnnnnnnnnnnnnnnnnnnnnnnnnnnnnnnnnnnnnnnnnnnnnnnnnnnnnnnnnnnnnnnnnnnnnnnnnnnnnnnnnnnnnnnnnnnnnnnnnnnnnnnnnnnnnnnnnnnnnnnnnnnnnnnnnnnnnnnnnnnnnnnnnnnnnnnnnnnnnnnnnnnnnnnnnnnnnnnnnnnnnnnnnnnnnnnnnnnnnnnnnnnnnnnnnnnnnnnnnnnnnnnnnnnnnnnnnnnnnnnnnnnnnnnnnnnnnnnnnnnnnnnnnnnnnnnnnnnnnnnnnnnnnnnnnnnnnnnnnnnnnnnnnnnnnnnnnnnnnnnnnnnnnnnnnnnnnnnnnnnnnnnnnnnnnnnnnnnnnnnnnnnnnnnnnnnnnnnnnnnnnnnnnnnnnnnnnnnnnnnnnnnnnnnnnnnnnnnnnnnnnnnnnnnnnnnnnnnnnnnnnnnnnnnnnnnnnnnnnnnnnnnnnnnnnnnnnnnnnnnnnnnnnnnnnnnnnnnnnnnnnnnnnnnnnnnnnnnnnnnnnnnnnnnnnnnnnnnnnnnnnnnnnnnnnnnnnnnnnnnnnnnnnnnnnnnnnnnnnnnnnnnnnnnnnnnnnnnnnnnnnnnnnnnnnnnnnnnnnnnnnnnnnnnnnnnnnnnnnnnnnnnnnnnnnnnnnnnnnnnnnnnnnnnnnnnnnnnnnnnnnnnnnnnnnnnnnnnnnnnnnnnnnnnnnnnnnnnnnnnnnnnnnnnnnnnnnnnnnnnnnnnnnnnnnnnnnnnnnnnnnnnnnnnnnnnnnnnnnnnnnnnnnnnnnnnnnnnnnnnnnnnnnnnnnnnnnnnnnnnnnnnnnnnnnnnnnnnnnnnnnnnnnnnnnnnnnnnnnnnnnnnnnnnnnnnnnnnnnnnnnnnnnnnnnnnnnnnnnnnnnnnnnnnnnnnnnnnnnnnnnnnnnnnnnnnnnnnnnnnnnnnnnnnnnnnnnnnnnnnnnnnnnnnnnnnnnnnnnnnnnnnnnnnnnnnnnnnnnnnnnnnnnnnnnnnnnnnnnnnnnnnnnnnnnnnnnnnnnnnnnnnnnnnnnnnnnnnnnnnnnnnnnnnnnnnnnnnnnnnnnnnnnnnnnnnnnnnnnnnnnnnnnnnnnnnnnnnnnnnnnnnnnnnnnnnnnnnnnnnnnnnnnnnnnnnnnnnnnnnnnnnnnnnnnnnnnnnnnnnnnnnnnnnnnnnnnnnnnnnnnnnnnnnnnnnnnnnnnnnnnnnnnnnnnnnnnnnnnnnnnnnnnnnnnnnnnnnnnnnnnnnnnnnnnnnnnnnnnnnnnnnnnnnnnnnnnnnnnnnnnnnnnnnnnnnnnnnnnnnnnnnnnnnnnnnnnnnnnnnnnnnnnnnnnnnnnnnnnnnnnnnnnnnnnnnnnnnnnnnnnnnnnnnnnnnnnnnnnnnnnnnnnnnnnnnnnnnnnnnnnnnnnnnnnnnnnnnnnnnnnnnnnnnnnnnnnnnnnnnnnnnnnnnnnnnnnnnnnnnnnnnnnnnnnnnnnnnnnnnnnnnnnnnnnnnnnnnnnnnnnnnnnnnnnnnnnnnnnnnnnnnnnnnnnnnnnnnnnnnnnnnnnnnnnnnnnnnnnnnnnnnnnnnnnnnnnnnnnnnnnnnnnnnnnnnnnnnnnnnnnnnnnnnnnnnnnnnnnnnnnnnnnnnnnnnnnnnnnnnnnnnnnnnnnnnnnnnnnnnnnnnnnnnnnnnnnnnnnnnnnnnnnnnnnnnnnnnnnnnnnnnnnnnnnnnnnnnnnnnnnnnnnnnnnnnnnnnnnnnnnnnnnnnnnnnnnnnnnnnnnnnnnnnnnnnnnnnnnnnnnnnnnnnnnnnnnnnnnnnnnnnnnnnnnnnnnnnnnnnnnnnnnnnnnnnnnnnnnnnnnnnnnnnnnnnnnnnnnnnnnnnnnnnnnnnnnnnnnnnnnnnnnnnnnnnnnnnnnnnnnnnnnnnnnnnnnnnnnnnnnnnnnnnnnnnnnnnnnnnnnnnnnnnnnnnnnnnnnnnnnnnnnnnnnnnnnnnnnnnnnnnnnnnnnnnnnnnnnnnnnnnnnnnnnnnnnnnnnnnnnnnnnnnnnnnnnnnnnnnnnnnnnnnnnnnnnnnnnnnnnnnnnnnnnnnnnnnnnnnnnnnnnnnnnnnnnnnnnnnnnnnnnnnnnnnnnnnnnnnnnnnnnnnnnnnnnnnnnnnnnnnnnnnnnnnnnnnnnnnnnnnnnnnnnnnnnnnnnnnnnnnnnnnnnnnnnnnnnnnnnnnnnnnnnnnnnnnnnnnnnnnnnnnnnnnnnnnnnnnnnnnnnnnnnnnnnnnnnnnnnnnnnnnnnnnnnnnnnnnnnnnnnnnnnnnnnnnnnnnnnnnnnnnnnnnnnnnnnnnnnnnnnnnnnnnnnnnnnnnnnnnnnnnnnnnnnnnnnnnnnnnnnnnnnnnnnnnnnnnnnnnnnnnnnnnnnnnnnnnnnnnnnnnnnnnnnnnnnnnnnnnnnnnnnnnnnnnnnnnnnnnnnnnnnnnnnnnnnnnnnnnnnnnnnnnnnnnnnnnnnnnnnnnnnnnnnnnnnnnnnnnnnnnnnnnnnnnnnnnnnnnnnnnnnnnnnnnnnnnnnnnnnnnnnnnnnnnnnnnnnnnnnnnnnnnnnnnnnnnnnnnnnnnnnnnnnnnnnnnnnnnnnnnnnnnnnnnnnnnnnnnnnnnnnnnnnnnnnnnnnnnnnnnnnnnnnnnnnnnnnnnnnnnnnnnnnnnnnnnnnnnnnnnnnnnnnnnnnnnnnnnnnnnnnnnnnnnnnnnnnnnnnnnnnnnnnnnnnnnnnnnnnnnnnnnnnnnnnnnnnnnnnnnnnnnnnnnnnnnnnnnnnnnnnnnnnnnnnnnnnnnnnnnnnnnnnnnnnnnnnnnnnnnnnnnnnnnnnnnnnnnnnnnnnnnnnnnnnnnnnnnnnnnnnnnnnnnnnnnnnnnnnnnnnnnnnnnnnnnnnnnnnnnnnnnnnnnnnnnnnnnnnnnnnnnnnnnnnnnnnnnnnnnnnnnnnnnnnnnnnnnnnnnnnnnnnnnnnnnnnnnnnnnnnnnnnnnnnnnnnnnnnnnnnnnnnnnnnnnnnnnnnnnnnnnnnnnnnnnnnnnnnnnnnnnnnnnnnnnnnnnnnnnnnnnnnnnnnnnnnnnnnnnnnnnnnnnnnnnnnnnnnnnnnnnnnnnnnnnnnnnnnnnnnnnnnnnnnnnnnnnnnnnnnnnnnnnnnnnnnnnnnnnnnnnnnnnnnnnnnnnnnnnnnnnnnnnnnnnnnnnnnnnnnnnnnnnnnnnnnnnnnnnnnnnnnnnnnnnnnnnnnnnnnnnnnnnnnnnnnnnnnnnnnnnnnnnnnnnnnnnnnnnnnnnnnnnnnnnnnnnnnnnnnnnnnnnnnnnnnnnnnnnnnnnnnnnnnnnnnnnnnnnnnnnnnnnnnnnnnnnnnnnnnnnnnnnnnnnnnnnnnnnnnnnnnnnnnnnnnnnnnnnnnnnnnnnnnnnnnnnnnnnnnnnnnnnnnnnnnnnnnnnnnnnnnnnnnnnnnnnnnnnnnnnnnnnnnnnnnnnnnnnnnnnnnnnnnnnnnnnnnnnnnnnnnnnnnnnnnnnnnnnnnnnnnnnnnnnnnnnnnnnnnnnnnnnnnnnnnnnnnnnnnnnnnnnnnnnnnnnnnnnnnnnnnnnnnnnnnnnnnnnnnnnnnnnnnnnnnnnnnnnnnnnnnnnnnnnnnnnnnnnnnnnnnnnnnnnnnnnnnnnnnnnnnnnnnnnnnnnnnnnnnnnnnnnnnnnnnnnnnnnnnnnnnnnnnnnnnnnnnnnnnnnnnnnnnnnnnnnnnnnnnnnnnnnnnnnnnnnnnnnnnnnnnnnnnnnnnnnnnnnnnnnnnnnnnnnnnnnnnnnnnnnnnnnnnnnnnnnnnnnnnnnnnnnnnnnnnnnnnnnnnnnnnnnnnnnnnnnnnnnnnnnnnnnnnnnnnnnnnnnnnnnnnnnnnnnnnnnnnnnnnnnnnnnnnnnnnnnnnnnnnnnnnnnnnnnnnnnnnnnnnnnnnnnnnnnnnnnnnnnnnnnnnnnnnnnnnnnnnnnnnnnnnnnnnnnnnnnnnnnnnnnnnnnnnnnnnnnnnnnnnnnnnnnnnnnnnnnnnnnnnnnnnnnnnnnnnnnnnnnnnnnnnnnnnnnnnnnnnnnnnnnnnnnnnnnnnnnnnnnnnnnnnnnnnnnnnnnnnnnnnnnnnnnnnnnnnnnnnnnnnnnnnnnnnnnnnnnnnnnnnnnnnnnnnnnnnnnnnnnnnnnnnnnnnnnnnnnnnnnnnnnnnnnnnnnnnnnnnnnnnnnnnnnnnnnnnnnnnnnnnnnnnnnnnnnnnnnnnnnnnnnnnnnnnnnnnnnnnnnnnnnnnnnnnnnnnnnnnnnnnnnnnnnnnnnnnnnnnnnnnnnnnnnnnnnnnnnnnnnnnnnnnnnnnnnnnnnnnnnnnnnnnnnnnnnnnnnnnnnnnnnnnnnnnnnnnnnnnnnnnnnnnnnnnnnnnnnnnnnnnnnnnnnnnnnnnnnnnnnnnnnnnnnnnnnnnnnnnnnnnnnnnnnnnnnnnnnnnnnnnnnnnnnnnnnnnnnnnnnnnnnnnnnnnnnnnnnnnnnnnnnnnnnnnnnnnnnnnnnnnnnnnnnnnnnnnnnnnnnnnnnnnnnnnnnnnnnnnnnnnnnnnnnnnnnnnnnnnnnnnnnnnnnnnnnnnnnnnnnnnnnnnnnnnnnnnnnnnnnnnnnnnnnnnnnnnnnnnnnnnnnnnnnnnnnnnnnnnnnnnnnnnnnnnnnnnnnnnnnnnnnnnnnnnnnnnnnnnnnnnnnnnnnnnnnnnnnnnnnnnnnnnnnnnnnnnnnnnnnnnnnnnnnnnnnnnnnnnnnnnnnnnnnnnnnnnnnnnnnnnnnnnnnnnnnnnnnnnnnnnnnnnnnnnnnnnnnnnnnnnnnnnnnnnnnnnnnnnnnnnnnnnnnnnnnnnnnnnnnnnnnnnnnnnnnnnnnnnnnnnnnnnnnnnnnnnnnnnnnnnnnnnnnnnnnnnnnnnnnnnnnnnnnnnnnnnnnnnnnnnnnnnnnnnnnnnnnnnnnnnnnnnnnnnnnnnnnnnnnnnnnnnnnnnnnnnnnnnnnnnnnnnnnnnnnnnnnnnnnnnnnnnnnnnnnnnnnnnnnnnnnnnnnnnnnnnnnnnnnnnnnnnnnnnnnnnnnnnnnnnnnnnnnnnnnnnnnnnnnnnnnnnnnnnnnnnnnnnnnnnnnnnnnnnnnnnnnnnnnnnnnnnnnnnnnnnnnnnnnnnnnnnnnnnnnnnnnnnnnnnnnnnnnnnnnnnnnnnnnnnnnnnnnnnnnnnnnnnnnnnnnnnnnnnnnnnnnnnnnnnnnnnnnnnnnnnnnnnnnnnnnnnnnnnnnnnnnnnnnnnnnnnnnnnnnnnnnnnnnnnnnnnnnnnnnnnnnnnnnnnnnnnnnnnnnnnnnnnnnnnnnnnnnnnnnnnnnnnnnnnnnnnnnnnnnnnnnnnnnnnnnnnnnnnnnnnnnnnnnnnnnnnnnnnnnnnnnnnnnnnnnnnnnnnnnnnnnnnnnnnnnnnnnnnnnnnnnnnnnnnnnnnnnnnnnnnnnnnnnnnnnnnnnnnnnnnnnnnnnnnnnnnnnnnnnnnnnnnnnnnnnnnnnnnnnnnnnnnnnnnnnnnnnnnnnnnnnnnnnnnnnnnnnnnnnnnnnnnnnnnnnnnnnnnnnnnnnnnnnnnnnnnnnnnnnnnnnnnnnnnnnnnnnnnnnnnnnnnnnnnnnnnnnnnnnnnnnnnnnnnnnnnnnnnnnnnnnnnnnnnnnnnnnnnnnnnnnnnnnnnnnnnnnnnnnnnnnnnnnnnnnnnnnnnnnnnnnnnnnnnnnnnnnnnnnnnnnnnnnnnnnnnnnnnnnnnnnnnnnnnnnnnnnnnnnnnnnnnnnnnnnnnnnnnnnnnnnnnnnnnnnnnnnnnnnnnnnnnnnnnnnnnnnnnnnnnnnnnnnnnnnnnnnnnnnnnnnnnnnnnnnnnnnnnnnnnnnnnnnnnnnnnnnnnnnnnnnnnnnnnnnnnnnnnnnnnnnnnnnnnnnnnnnnnnnnnnnnnnnnnnnnnnnnnnnnnnnnnnnnnnnnnnnnnnnnnnnnnnnnnnnnnnnnnnnnnnnnnnnnnnnnnnnnnnnnnnnnnnnnnnnnnnnnnnnnnnnnnnnnnnnnnnnnnnnnnnnnnnnnnnnnnnnnnnnnnnnnnnnnnnnnnnnnnnnnnnnnnnnnnnnnnnnnnnnnnnnnnnnnnnnnnnnnnnnnnnnnnnnnnnnnnnnnnnnnnnnnnnnnnnnnnnnnnnnnnnnnnnnnnnnnnnnnnnnnnnnnnnnnnnnnnnnnnnnnnnnnnnnnnnnnnnnnnnnnnnnnnnnnnnnnnnnnnnnnnnnnnnnnnnnnnnnnnnnnnnnnnnnnnnnnnnnnnnnnnnnnnnnnnnnnnnnnnnnnnnnnnnnnnnnnnnnnnnnnnnnnnnnnnnnnnnnnnnnnnnnnnnnnnnnnnnnnnnnnnnnnnnnnnnnnnnnnnnnnnnnnnnnnnnnnnnnnnnnnnnnnnnnnnnnnnnnnnnnnnnnnnnnnnnnnnnnnnnnnnnnnnnnnnnnnnnnnnnnnnnnnnnnnnnnnnnnnnnnnnnnnnnnnnnnnnnnnnnnnnnnnnnnnnnnnnnnnnnnnnnnnnnnnnnnnnnnnnnnnnnnnnnnnnnnnnnnnnnnnnnnnnnnnnnnnnnnnnnnnnnnnnnnnnnnnnnnnnnnnnnnnnnnnnnnnnnnnnnnnnnnnnnnnnnnnnnnnnnnnnnnnnnnnnnnnnnnnnnnnnnnnnnnnnnnnnnnnnnnnnnnnnnnnnnnnnnnnnnnnnnnnnnnnnnnnnnnnnnnnnnnnnnnnnnnnnnnnnnnnnnnnnnnnnnnnnnnnnnnnnnnnnnnnnnnnnnnnnnnnnnnnnnnnnnnnnnnnnnnnnnnnnnnnnnnnnnnnnnnnnnnnnnnnnnnnnnnnnnnnnnnnnnnnnnnnnnnnnnnnnnnnnnnnnnnnnnnnnnnnnnnnnnnnnnnnnnnnnnnnnnnnnnnnnnnnnnnnnnnnnnnnnnnnnnnnnnnnnnnnnnnnnnnnnnnnnnnnnnnnnnnnnnnnnnnnnnnnnnnnnnnnnnnnnnnnnnnnnnnnnnnnnnnnnnnnnnnnnnnnnnnnnnnnnnnnnnnnnnnnnnnnnnnnnnnnnnnnnnnnnnnnnnnnnnnnnnnnnnnnnnnnnnnnnnnnnnnnnnnnnnnnnnnnnnnnnnnnnnnnnnnnnnnnnnnnnnnnnnnnnnnnnnnnnnnnnnnnnnnnnnnnnnnnnnnnnnnnnnnnnnnnnnnnnnnnnnnnnnnnnnnnnnnnnnnnnnnnnnnnnnnnnnnnnnnnnnnnnnnnnnnnnnnnnnnnnnnnnnnnnnnnnnnnnnnnnnnnnnnnnnnnnnnnnnnnnnnnnnnnnnnnnnnnnnnnnnnnnnnnnnnnnnnnnnnnnnnnnnnnnnnnnnnnnnnnnnnnnnnnnnnnnnnnnnnnnnnnnnnnnnnnnnnnnnnnnnnnnnnnnnnnnnnnnnnnnnnnnnnnnnnnnnnnnnnnnnnnnnnnnnnnnnnnnnnnnnnnnnnnnnnnnnnnnnnnnnnnnnnnnnnnnnnnnnnnnnnnnnnnnnnnnnnnnnnnnnnnnnnnnnnnnnnnnnnnnnnnnnnnnnnnnnnnnnnnnnnnnnnnnnnnnnnnnnnnnnnnnnnnnnnnnnnnnnnnnnnnnnnnnnnnnnnnnnnnnnnnnnnnnnnnnnnnnnnnnnnnnnnnnnnnnnnnnnnnnnnnnnnnnnnnnnnnnnnnnnnnnnnnnnnnnnnnnnnnnnnnnnnnnnnnnnnnnnnnnnnnnnnnnnnnnnnnnnnnnnnnnnnnnnnnnnnnnnnnnnnnnnnnnnnnnnnnnnnnnnnnnnnnnnnnnnnnnnnnnnnnnnnnnnnnnnnnnnnnnnnnnnnnnnnnnnnnnnnnnnnnnnnnnnnnnnnnnnnnnnnnnnnnnnnnnnnnnnnnnnnnnnnnnnnnnnnnnnnnnnnnnnnnnnnnnnnnnnnnnnnnnnnnnnnnnnnnnnnnnnnnnnnnnnnnnnnnnnnnnnnnnnnnnnnnnnnnnnnnnnnnnnnnnnnnnnnnnnnnnnnnnnnnnnnnnnnnnnnnnnnnnnnnnnnnnnnnnnnnnnnnnnnnnnnnnnnnnnnnnnnnnnnnnnnnnnnnnnnnnnnnnnnnnnnnnnnnnnnnnnnnnnnnnnnnnnnnnnnnnnnnnnnnnnnnnnnnnnnnnnnnnnnnnnnnnnnnnnnnnnnnnnnnnnnnnnnnnnnnnnnnnnnnnnnnnnnnnnnnnnnnnnnnnnnnnnnnnnnnnnnnnnnnnnnnnnnnnnnnnnnnnnnnnnnnnnnnnnnnnnnnnnnnnnnnnnnnnnnnnnnnnnnnnnnnnnnnnnnnnnnnnnnnnnnnnnnnnnnnnnnnnnnnnnnnnnnnnnnnnnnnnnnnnnnnnnnnnnnnnnnnnnnnnnnnnnnnnnnnnnnnnnnnnnnnnnnnnnnnnnnnnnnnnnnnnnnnnnnnnnnnnnnnnnnnnnnnnnnnnnnnnnnnnnnnnnnnnnnnnnnnnnnnnnnnnnnnnnnnnnnnnnnnnnnnnnnnnnnnnnnnnnnnnnnnnnnnnnnnnnnnnnnnnnnnnnnnnnnnnnnnnnnnnnnnnnnnnnnnnnnnnnnnnnnnnnnnnnnnnnnnnnnnnnnnnnnnnnnnnnnnnnnnnnnnnnnnnnnnnnnnnnnnnnnnnnnnnnnnnnnnnnnnnnnnnnnnnnnnnnnnnnnnnnnnnnnnnnnnnnnnnnnnnnnnnnnnnnnnnnnnnnnnnnnnnnnnnnnnnnnnnnnnnnnnnnnnnnnnnnnnnnnnnnnnnnnnnnnnnnnnnnnnnnnnnnnnnnnnnnnnnnnnnnnnnnnnnnnnnnnnnnnnnnnnnnnnnnnnnnnnnnnnnnnnnnnnnnnnnnnnnnnnnnnnnnnnnnnnnnnnnnnnnnnnnnnnnnnnnnnnnnnnnnnnnnnnnnnnnnnnnnnnnnnnnnnnnnnnnnnnnnnnnnnnnnnnnnnnnnnnnnnnnnnnnnnnnnnnnnnnnnnnnnnnnnnnnnnnnnnnnnnnnnnnnnnnnnnnnnnnnnnnnnnnnnnnnnnnnnnnnnnnnnnnnnnnnnnnnnnnnnnnnnnnnnnnnnnnnnnnnnnnnnnnnnnnnnnnnnnnnnnnnnnnnnnnnnnnnnnnnnnnnnnnnnnnnnnnnnnnnnnnnnnnnnnnnnnnnnnnnnnnnnnnnnnnnnnnnnnnnnnnnnnnnnnnnnnnnnnnnnnnnnnnnnnnnnnnnnnnnnnnnnnnnnnnnnnnnnnnnnnnnnnnnnnnnnnnnnnnnnnnnnnnnnnnnnnnnnnnnnnnnnnnnnnnnnnnnnnnnnnnnnnnnnnnnnnnnnnnnnnnnnnnnnnnnnnnnnnnnnnnnnnnnnnnnnnnnnnnnnnnnnnnnnnnnnnnnnnnnnnnnnnnnnnnnnnnnnnnnnnnnnnnnnnnnnnnnnnnnnnnnnnnnnnnnnnnnnnnnnnnnnnnnnnnnnnnnnnnnnnnnnnnnnnnnnnnnnnnnnnnnnnnnnnnnnnnnnnnnnnnnnnnnnnnnnnnnnnnnnnnnnnnnnnnnnnnnnnnnnnnnnnnnnnnnnnnnnnnnnnnnnnnnnnnnnnnnnnnnnnnnnnnnnnnnnnnnnnnnnnnnnnnnnnnnnnnnnnnnnnnnnnnnnnnnnnnnnnnnnnnnnnnnnnnnnnnnnnnnnnnnnnnnnnnnnnnnnnnnnnnnnnnnnnnnnnnnnnnnnnnnnnnnnnnnnnnnnnnnnnnnnnnnnnnnnnnnnnnnnnnnnnnnnnnnnnnnnnnnnnnnnnnnnnnnnnnnnnnnnnnnnnnnnnnnnnnnnnnnnnnnnnnnnnnnnnnnnnnnnnnnnnnnnnnnnnnnnnnnnnnnnnnnnnnnnnnnnnnnnnnnnnnnnnnnnnnnnnnnnnnnnnnnnnnnnnnnnnnnnnnnnnnnnnnnnnnnnnnnnnnnnnnnnnnnnnnnnnnnnnnnnnnnnnnnnnnnnnnnnnnnnnnnnnnnnnnnnnnnnnnnnnnnnnnnnnnnnnnnnnnnnnnnnnnnnnnnnnnnnnnnnnnnnnnnnnnnnnnnnnnnnnnnnnnnnnnnnnnnnnnnnnnnnnnnnnnnnnnnnnnnnnnnnnnnnnnnnnnnnnnnnnnnnnnnnnnnnnnnnnnnnnnnnnnnnnnnnnnnnnnnnnnnnnnnnnnnnnnnnnnnnnnnnnnnnnnnnnnnnnnnnnnnnnnnnnnnnnnnnnnnnnnnnnnnnnnnnnnnnnnnnnnnnnnnnnnnnnnnnnnnnnnnnnnnnnnnnnnnnnnnnnnnnnnnnnnnnnnnnnnnnnnnnnnnnnnnnnnnnnnnnnnnnnnnnnnnnnnnnnnnnnnnnnnnnnnnnnnnnnnnnnnnnnnnnnnnnnnnnnnnnnnnnnnnnnnnnnnnnnnnnnnnnnnnnnnnnnnnnnnnnnnnnnnnnnnnnnnnnnnnnnnnnnnnnnnnnnnnnnnnnnnnnnnnnnnnnnnnnnnnnnnnnnnnnnnnnnnnnnnnnnnnnnnnnnnnnnnnnnnnnnnnnnnnnnnnnnnnnnnnnnnnnnnnnnnnnnnnnnnnnnnnnnnnnnnnnnnnnnnnnnnnnnnnnnnnnnnnnnnnnnnnnnnnnnnnnnnnnnnnnnnnnnnnnnnnnnnnnnnnnnnnnnnnnnnnnnnnnnnnnnnnnnnnnnnnnnnnnnnnnnnnnnnnnnnnnnnnnnnnnnnnnnnnnnnnnnnnnnnnnnnnnnnnnnnnnnnnnnnnnnnnnnnnnnnnnnnnnnnnnnnnnnnnnnnnnnnnnnnnnnnnnnnnnnnnnnnnnnnnnnnnnnnnnnnnnnnnnnnnnnnnnnnnnnnnnnnnnnnnnnnnnnnnnnnnnnnnnnnnnnnnnnnnnnnnnnnnnnnnnnnnnnnnnnnnnnnnnnnnnnnnnnnnnnnnnnnnnnnnnnnnnnnnnnnnnnnnnnnnnnnnnnnnnnnnnnnnnnnnnnnnnnnnnnnnnnnnnnnnnnnnnnnnnnnnnnnnnnnnnnnnnnnnnnnnnnnnnnnnnnnnnnnnnnnnnnnnnnnnnnnnnnnnnnnnnnnnnnnnnnnnnnnnnnnnnnnnnnnnnnnnnnnnnnnnnnnnnnnnnnnnnnnnnnnnnnnnnnnnnnnnnnnnnnnnnnnnnnnnnnnnnnnnnnnnnnnnnnnnnnnnnnnnnnnnnnnnnnnnnnnnnnnnnnnnnnnnnnnnnnnnnnnnnnnnnnnnnnnnnnnnnnnnnnnnnnnnnnnnnnnnnnnnnnnnnnnnnnnnnnnnnnnnnnnnnnnnnnnnnnnnnnnnnnnnnnnnnnnnnnnnnnnnnnnnnnnnnnnnnnnnnnnnnnnnnnnnnnnnnnnnnnnnnnnnnnnnnnnnnnnnnnnnnnnnnnnnnnnnnnnnnnnnnnnnnnnnnnnnnnnnnnnnnnnnnnnnnnnnnnnnnnnnnnnnnnnnnnnnnnnnnnnnnnnnnnnnnnnnnnnnnnnnnnnnnnnnnnnnnnnnnnnnnnnnnnnnnnnnnnnnnnnnnnnnnnnnnnnnnnnnnnnnnnnnnnnnnnnnnnnnnnnnnnnnnnnnnnnnnnnnnnnnnnnnnnnnnnnnnnnnnnnnnnnnnnnnnnnnnnnnnnnnnnnnnnnnnnnnnnnnnnnnnnnnnnnnnnnnnnnnnnnnnnnnnnnnnnnnnnnnnnnnnnnnnnnnnnnnnnnnnnnnnnnnnnnnnnnnnnnnnnnnnnnnnnnnnnnnnnnnnnnnnnnnnnnnnnnnnnnnnnnnnnnnnnnnnnnnnnnnnnnnnnnnnnnnnnnnnnnnnnnnnnnnnnnnnnnnnnnnnnnnnnnnnnnnnnnnnnnnnnnnnnnnnnnnnnnnnnnnnnnnnnnnnnnnnnnnnnnnnnnnnnnnnnnnnnnnnnnnnnnnnnnnnnnnnnnnnnnnnnnnnnnnnnnnnnnnnnnnnnnnnnnnnnnnnnnnnnnnnnnnnnnnnnnnnnnnnnnnnnnnnnnnnnnnnnnnnnnnnnnnnnnnnnnnnnnnnnnnnnnnnnnnnnnnnnnnnnnnnnnnnnnnnnnnnnnnnnnnnnnnnnnnnnnnnnnnnnnnnnnnnnnnnnnnnnnnnnnnnnnnnnnnnnnnnnnnnnnnnnnnnnnnnnnnnnnnnnnnnnnnnnnnnnnnnnnnnnnnnnnnnnnnnnnnnnnnnnnnnnnnnnnnnnnnnnnnnnnnnnnnnnnnnnnnnnnnnnnnnnnnnnnnnnnnnnnnnnnnnnnnnnnnnnnnnnnnnnnnnnnnnnnnnnnnnnnnnnnnnnnnnnnnnnnnnnnnnnnnnnnnnnnnnnnnnnnnnnnnnnnnnnnnnnnnnnnnnnnnnnnnnnnnnnnnnnnnnnnnnnnnnnnnnnnnnnnnnnnnnnnnnnnnnnnnnnnnnnnnnnnnnnnnnnnnnnnnnnnnnnnnnnnnnnnnnnnnnnnnnnnnnnnnnnnnnnnnnnnnnnnnnnnnnnnnnnnnnnnnnnnnnnnnnnnnnnnnnnnnnnnnnnnnnnnnnnnnnnnnnnnnnnnnnnnnnnnnnnnnnnnnnnnnnnnnnnnnnnnnnnnnnnnnnnnnnnnnnnnnnnnnnnnnnnnnnnnnnnnnnnnnnnnnnnnnnnnnnnnnnnnnnnnnnnnnnnnnnnnnnnnnnnnnnnnnnnnnnnnnnnnnnnnnnnnnnnnnnnnnnnnnnnnnnnnnnnnnnnnnnnnnnnnnnnnnnnnnnnnnnnnnnnnnnnnnnnnnnnnnnnnnnnnnnnnnnnnnnnnnnnnnnnnnnnnnnnnnnnnnnnnnnnnnnnnnnnnnnnnnnnnnnnnnnnnnnnnnnnnnnnnnnnnnnnnnnnnnnnnnnnnnnnnnnnnnnnnnnnnnnnnnnnnnnnnnnnnnnnnnnnnnnnnnnnnnnnnnnnnnnnnnnnnnnnnnnnnnnnnnnnnnnnnnnnnnnnnnnnnnnnnnnnnnnnnnnnnnnnnnnnnnnnnnnnnnnnnnnnnnnnnnnnnnnnnnnnnnnnnnnnnnnnnnnnnnnnnnnnnnnnnnnnnnnnnnnnnnnnnnnnnnnnnnnnnnnnnnnnnnnnnnnnnnnnnnnnnnnnnnnnnnnnnnnnnnnnnnnnnnnnnnnnnnnnnnnnnnnnnnnnnnnnnnnnnnnnnnnnnnnnnnnnnnnnnnnnnnnnnnnnnnnnnnnnnnnnnnnnnnnnnnnnnnnnnnnnnnnnnnnnnnnnnnnnnnnnnnnnnnnnnnnnnnnnnnnnnnnnnnnnnnnnnnnnnnnnnnnnnnnnnnnnnnnnnnnnnnnnnnnnnnnnnnnnnnnnnnnnnnnnnnnnnnnnnnnnnnnnnnnnnnnnnnnnnnnnnnnnnnnnnnnnnnnnnnnnnnnnnnnnnnnnnnnnnnnnnnnnnnnnnnnnnnnnnnnnnnnnnnnnnnnnnnnnnnnnnnnnnnnnnnnnnnnnnnnnnnnnnnnnnnnnnnnnnnnnnnnnnnnnnnnnnnnnnnnnnnnnnnnnnnnnnnnnnnnnnnnnnnnnnnnnnnnnnnnnnnnnnnnnnnnnnnnnnnnnnnnnnnnnnnnnnnnnnnnnnnnnnnnnnnnnnnnnnnnnnnnnnnnnnnnnnnnnnnnnnnnnnnnnnnnnnnnnnnnnnnnnnnnnnnnnnnnnnnnnnnnnnnnnnnnnnnnnnnnnnnnnnnnnnnnnnnnnnnnnnnnnnnnnnnnnnnnnnnnnnnnnnnnnnnnnnnnnnnnnnnnnnnnnnnnnnnnnnnnnnnnnnnnnnnnnnnnnnnnnnnnnnnnnnnnnnnnnnnnnnnnnnnnnnnnnnnnnnnnnnnnnnnnnnnnnnnnnnnnnnnnnnnnnnnnnnnnnnnnnnnnnnnnnnnnnnnnnnnnnnnnnnnnnnnnnnnnnnnnnnnnnnnnnnnnnnnnnnnnnnnnnnnnnnnnnnnnnnnnnnnnnnnnnnnnnnnnnnnnnnnnnnnnnnnnnnnnnnnnnnnnnnnnnnnnnnnnnnnnnnnnnnnnnnnnnnnnnnnnnnnnnnnnnnnnnnnnnnnnnnnnnnnnnnnnnnnnnnnnnnnnnnnnnnnnnnnnnnnnnnnnnnnnnnnnnnnnnnnnnnnnnnnnnnnnnnnnnnnnnnnnnnnnnnnnnnnnnnnnnnnnnnnnnnnnnnnnnnnnnnnnnnnnnnnnnnnnnnnnnnnnnnnnnnnnnnnnnnnnnnnnnnnnnnnnnnnnnnnnnnnnnnnnnnnnnnnnnnnnnnnnnnnnnnnnnnnnnnnnnnnnnnnnnnnnnnnnnnnnnnnnnnnnnnnnnnnnnnnnnnnnnnnnnnnnnnnnnnnnnnnnnnnnnnnnnnnnnnnnnnnnnnnnnnnnnnnnnnnnnnnnnnnnnnnnnnnnnnnnnnnnnnnnnnnnnnnnnnnnnnnnnnnnnnnnnnnnnnnnnnnnnnnnnnnnnnnnnnnnnnnnnnnnnnnnnnnnnnnnnnnnnnnnnnnnnnnnnnnnnnnnnnnnnnnnnnnnnnnnnnnnnnnnnnnnnnnnnnnnnnnnnnnnnnnnnnnnnnnnnnnnnnnnnnnnnnnnnnnnnnnnnnnnnnnnnnnnnnnnnnnnnnnnnnnnnnnnnnnnnnnnnnnnnnnnnnnnnnnnnnnnnnnnnnnnnnnnnnnnnnnnnnnnnnnnnnnnnnnnnnnnnnnnnnnnnnnnnnnnnnnnnnnnnnnnnnnnnnnnnnnnnnnnnnnnnnnnnnnnnnnnnnnnnnnnnnnnnnnnnnnnnnnnnnnnnnnnnnnnnnnnnnnnnnnnnnnnnnnnnnnnnnnnnnnnnnnnnnnnnnnnnnnnnnnnnnnnnnnnnnnnnnnnnnnnnnnnnnnnnnnnnnnnnnnnnnnnnnnnnnnnnnnnnnnnnnnnnnnnnnnnnnnnnnnnnnnnnnnnnnnnnnnnnnnnnnnnnnnnnnnnnnnnnnnnnnnnnnnnnnnnnnnnnnnnnnnnnnnnnnnnnnnnnnnnnnnnnnnnnnnnnnnnnnnnnnnnnnnnnnnnnnnnnnnnnnnnnnnnnnnnnnnnnnnnnnnnnnnnnnnnnnnnnnnnnnnnnnnnnnnnnnnnnnnnnnnnnnnnnnnnnnnnnnnnnnnnnnnnnnnnnnnnnnnnnnnnnnnnnnnnnnnnnnnnnnnnnnnnnnnnnnnnnnnnnnnnnnnnnnnnnnnnnnnnnnnnnnnnnnnnnnnnnnnnnnnnnnnnnnnnnnnnnnnnnnnnnnnnnnnnnnnnnnnnnnnnnnnnnnnnnnnnnnnnnnnnnnnnnnnnnnnnnnnnnnnnnnnnnnnnnnnnnnnnnnnnnnnnnnnnnnnnnnnnnnnnnnnnnnnnnnnnnnnnnnnnnnnnnnnnnnnnnnnnnnnnnnnnnnnnnnnnnnnnnnnnnnnnnnnnnnnnnnnnnnnnnnnnnnnnnnnnnnnnnnnnnnnnnnnnnnnnnnnnnnnnnnnnnnnnnnnnnnnnnnnnnnnnnnnnnnnnnnnnnnnnnnnnnnnnnnnnnnnnnnnnnnnnnnnnnnnnnnnnnnnnnnnnnnnnnnnnnnnnnnnnnnnnnnnnnnnnnnnnnnnnnnnnnnnnnnnnnnnnnnnnnnnnnnnnnnnnnnnnnnnnnnnnnnnnnnnnnnnnnnnnnnnnnnnnnnnnnnnnnnnnnnnnnnnnnnnnnnnnnnnnnnnnnnnnnnnnnnnnnnnnnnnnnnnnnnnnnnnnnnnnnnnnnnnnnnnnnnnnnnnnnnnnnnnnnnnnnnnnnnnnnnnnnnnnnnnnnnnnnnnnnnnnnnnnnnnnnnnnnnnnnnnnnnnnnnnnnnnnnnnnnnnnnnnnnnnnnnnnnnnnnnnnnnnnnnnnnnnnnnnnnnnnnnnnnnnnnnnnnnnnnnnnnnnnnnnnnnnnnnnnnnnnnnnnnnnnnnnnnnnnnnnnnnnnnnnnnnnnnnnnnnnnnnnnnnnnnnnnnnnnnnnnnnnnnnnnnnnnnnnnnnnnnnnnnnnnnnnnnnnnnnnnnnnnnnnnnnnnnnnnnnnnnnnnnnnnnnnnnnnnnnnnnnnnnnnnnnnnnnnnnnnnnnnnnnnnnnnnnnnnnnnnnnnnnnnnnnnnnnnnnnnnnnnnnnnnnnnnnnnnnnnnnnnnnnnnnnnnnnnnnnnnnnnnnnnnnnnnnnnnnnnnnnnnnnnnnnnnnnnnnnnnnnnnnnnnnnnnnnnnnnnnnnnnnnnnnnnnnnnnnnnnnnnnnnnnnnnnnnnnnnnnnnnnnnnnnnnnnnnnnnnnnnnnnnnnnnnnnnnnnnnnnnnnnnnnnnnnnnnnnnnnnnnnnnnnnnnnnnnnnnnnnnnnnnnnnnnnnnnnnnnnnnnnnnnnnnnnnnnnnnnnnnnnnnnnnnnnnnnnnnnnnnnnnnnnnnnnnnnnnnnnnnnnnnnnnnnnnnnnnnnnnnnnnnnnnnnnnnnnnnnnnnnnnnnnnnnnnnnnnnnnnnnnnnnnnnnnnnnnnnnnnnnnnnnnnnnnnnnnnnnnnnnnnnnnnnnnnnnnnnnnnnnnnnnnnnnnnnnnnnnnnnnnnnnnnnnnnnnnnnnnnnnnnnnnnnnnnnnnnnnnnnnnnnnnnnnnnnnnnnnnnnnnnnnnnnnnnnnnnnnnnnnnnnnnnnnnnnnnnnnnnnnnnnnnnnnnnnnnnnnnnnnnnnnnnnnnnnnnnnnnnnnnnnnnnnnnnnnnnnnnnnnnnnnnnnnnnnnnnnnnnnnnnnnnnnnnnnnnnnnnnnnnnnnnnnnnnnnnnnnnnnnnnnnnnnnnnnnnnnnnnnnnnnnnnnnnnnnnnnnnnnnnnnnnnnnnnnnnnnnnnnnnnnnnnnnnnnnnnnnnnnnnnnnnnnnnnnnnnnnnnnnnnnnnnnnnnnnnnnnnnnnnnnnnnnnnnnnnnnnnnnnnnnnnnnnnnnnnnnnnnnnnnnnnnnnnnnnnnnnnnnnnnnnnnnnnnnnnnnnnnnnnnnnnnnnnnnnnnnnnnnnnnnnnnnnnnnnnnnnnnnnnnnnnnnnnnnnnnnnnnnnnnnnnnnnnnnnnnnnnnnnnnnnnnnnnnnnnnnnnnnnnnnnnnnnnnnnnnnnnnnnnnnnnnnnnnnnnnnnnnnnnnnnnnnnnnnnnnnnnnnnnnnnnnnnnnnnnnnnnnnnnnnnnnnnnnnnnnnnnnnnnnnnnnnnnnnnnnnnnnnnnnnnnnnnnnnnnnnnnnnnnnnnnnnnnnnnnnnnnnnnnnnnnnnnnnnnnnnnnnnnnnnnnnnnnnnnnnnnnnnnnnnnnnnnnnnnnnnnnnnnnnnnnnnnnnnnnnnnnnnnnnnnnnnnnnnnnnnnnnnnnnnnnnnnnnnnnnnnnnnnnnnnnnnnnnnnnnnnnnnnnnnnnnnnnnnnnnnnnnnnnnnnnnnnnnnnnnnnnnnnnnnnnnnnnnnnnnnnnnnnnnnnnnnnnnnnnnnnnnnnnnnnnnnnnnnnnnnnnnnnnnnnnnnnnnnnnnnnnnnnnnnnnnnnnnnnnnnnnnnnnnnnnnnnnnnnnnnnnnnnnnnnnnnnnnnnnnnnnnnnnnnnnnnnnnnnnnnnnnnnnnnnnnnnnnnnnnnnnnnnnnnnnnnnnnnnnnnnnnnnnnnnnnnnnnnnnnnnnnnnnnnnnnnnnnnnnnnnnnnnnnnnnnnnnnnnnnnnnnnnnnnnnnnnnnnnnnnnnnnnnnnnnnnnnnnnnnnnnnnnnnnnnnnnnnnnnnnnnnnnnnnnnnnnnnnnnnnnnnnnnnnnnnnnnnnnnnnnnnnnnnnnnnnnnnnnnnnnnnnnnnnnnnnnnnnnnnnnnnnnnnnnnnnnnnnnnnnnnnnnnnnnnnnnnnnnnnnnnnnnnnnnnnnnnnnnnnnnnnnnnnnnnnnnnnnnnnnnnnnnnnnnnnnnnnnnnnnnnnnnnnnnnnnnnnnnnnnnnnnnnnnnnnnnnnnnnnnnnnnnnnnnnnnnnnnnnnnnnnnnnnnnnnnnnnnnnnnnnnnnnnnnnnnnnnnnnnnnnnnnnnnnnnnnnnnnnnnnnnnnnnnnnnnnnnnnnnnnnnnnnnnnnnnnnnnnnnnnnnnnnnnnnnnnnnnnnnnnnnnnnnnnnnnnnnnnnnnnnnnnnnnnnnnnnnnnnnnnnnnnnnnnnnnnnnnnnnnnnnnnnnnnnnnnnnnnnnnnnnnnnnnnnnnnnnnnnnnnnnnnnnnnnnnnnnnnnnnnnnnnnnnnnnnnnnnnnnnnnnnnnnnnnnnnnnnnnnnnnnnnnnnnnnnnnnnnnnnnnnnnnnnnnnnnnnnnnnnnnnnnnnnnnnnnnnnnnnnnnnnnnnnnnnnnnnnnnnnnnnnnnnnnnnnnnnnnnnnnnnnnnnnnnnnnnnnnnnnnnnnnnnnnnnnnnnnnnnnnnnnnnnnnnnnnnnnnnnnnnnnnnnnnnnnnnnnnnnnnnnnnnnnnnnnnnnnnnnnnnnnnnnnnnnnnnnnnnnnnnnnnnnnnnnnnnnnnnnnnnnnnnnnnnnnnnnnnnnnnnnnnnnnnnnnnnnnnnnnnnnnnnnnnnnnnnnnnnnnnnnnnnnnnnnnnnnnnnnnnnnnnnnnnnnnnnnnnnnnnnnnnnnnnnnnnnnnnnnnnnnnnnnnnnnnnnnnnnnnnnnnnnnnnnnnnnnnnnnnnnnnnnnnnnnnnnnnnnnnnnnnnnnnnnnnnnnnnnnnnnnnnnnnnnnnnnnnnnnnnnnnnnnnnnnnnnnnnnnnnnnnnnnnnnnnnnnnnnnnnnnnnnnnnnnnnnnnnnnnnnnnnnnnnnnnnnnnnnnnnnnnnnnnnnnnnnnnnnnnnnnnnnnnnnnnnnnnnnnnnnnnnnnnnnnnnnnnnnnnnnnnnnnnnnnnnnnnnnnnnnnnnnnnnnnnnnnnnnnnnnnnnnnnnnnnnnnnnnnnnnnnnnnnnnnnnnnnnnnnnnnnnnnnnnnnnnnnnnnnnnnnnnnnnnnnnnnnnnnnnnnnnnnnnnnnnnnnnnnnnnnnnnnnnnnnnnnnnnnnnnnnnnnnnnnnnnnnnnnnnnnnnnnnnnnnnnnnnnnnnnnnnnnnnnnnnnnnnnnnnnnnnnnnnnnnnnnnnnnnnnnnnnnnnnnnnnnnnnnnnnnnnnnnnnnnnnnnnnnnnnnnnnnnnnnnnnnnnnnnnnnnnnnnnnnnnnnnnnnnnnnnnnnnnnnnnnnnnnnnnnnnnnnnnnnnnnnnnnnnnnnnnnnnnnnnnnnnnnnnnnnnnnnnnnnnnnnnnnnnnnnnnnnnnnnnnnnnnnnnnnnnnnnnnnnnnnnnnnnnnnnnnnnnnnnnnnnnnnnnnnnnnnnnnnnnnnnnnnnnnnnnnnnnnnnnnnnnnnnnnnnnnnnnnnnnnnnnnnnnnnnnnnnnnnnnnnnnnnnnnnnnnnnnnnnnnnnnnnnnnnnnnnnnnnnnnnnnnnnnnnnnnnnnnnnnnnnnnnnnnnnnnnnnnnnnnnnnnnnnnnnnnnnnnnnnnnnnnnnnnnnnnnnnnnnnnnnnnnnnnnnnnnnnnnnnnnnnnnnnnnnnnnnnnnnnnnnnnnnnnnnnnnnnnnnnnnnnnnnnnnnnnnnnnnnnnnnnnnnnnnnnnnnnnnnnnnnnnnnnnnnnnnnnnnnnnnnnnnnnnnnnnnnnnnnnnnnnnnnnnnnnnnnnnnnnnnnnnnnnnnnnnnnnnnnnnnnnnnnnnnnnnnnnnnnnnnnnnnnnnnnnnnnnnnnnnnnnnnnnnnnnnnnnnnnnnnnnnnnnnnnnnnnnnnnnnnnnnnnnnnnnnnnnnnnnnnnnnnnnnnnnnnnnnnnnnnnnnnnnnnnnnnnnnnnnnnnnnnnnnnnnnnnnnnnnnnnnnnnnnnnnnnnnnnnnnnnnnnnnnnnnnnnnnnnnnnnnnnnnnnnnnnnnnnnnnnnnnnnnnnnnnnnnnnnnnnnnnnnnnnnnnnnnnnnnnnnnnnnnnnnnnnnnnnnnnnnnnnnnnnnnnnnnnnnnnnnnnnnnnnnnnnnnnnnnnnnnnnnnnnnnnnnnnnnnnnnnnnnnnnnnnnnnnnnnnnnnnnnnnnnnnnnnnnnnnnnnnnnnnnnnnnnnnnnnnnnnnnnnnnnnnnnnnnnnnnnnnnnnnnnnnnnnnnnnnnnnnnnnnnnnnnnnnnnnnnnnnnnnnnnnnnnnnnnnnnnnnnnnnnnnnnnnnnnnnnnnnnnnnnnnnnnnnnnnnnnnnnnnnnnnnnnnnnnnnnnnnnnnnnnnnnnnnnnnnnnnnnnnnnnnnnnnnnnnnnnnnnnnnnnnnnnnnnnnnnnnnnnnnnnnnnnnnnnnnnnnnnnnnnnnnnnnnnnnnnnnnnnnnnnnnnnnnnnnnnnnnnnnnnnnnnnnnnnnnnnnnnnnnnnnnnnnnnnnnnnnnnnnnnnnnnnnnnnnnnnnnnnnnnnnnnnnnnnnnnnnnnnnnnnnnnnnnnnnnnnnnnnnnnnnnnnnnnnnnnnnnnnnnnnnnnnnnnnnnnnnnnnnnnnnnnnnnnnnnnnnnnnnnnnnnnnnnnnnnnnnnnnnnnnnnnnnnnnnnnnnnnnnnnnnnnnnnnnnnnnnnnnnnnnnnnnnnnnnnnnnnnnnnnnnnnnnnnnnnnnnnnnnnnnnnnnnnnnnnnnnnnnnnnnnnnnnnnnnnnnnnnnnnnnnnnnnnnnnnnnnnnnnnnnnnnnnnnnnnnnnnnnnnnnnnnnnnnnnnnnnnnnnnnnnnnnnnnnnnnnnnnnnnnnnnnnnnnnnnnnnnnnnnnnnnnnnnnnnnnnnnnnnnnnnnnnnnnnnnnnnnnnnnnnnnnnnnnnnnnnnnnnnnnnnnnnnnnnnnnnnnnnnnnnnnnnnnnnnnnnnnnnnnnnnnnnnnnnnnnnnnnnnnnnnnnnnnnnnnnnnnnnnnnnnnnnnnnnnnnnnnnnnnnnnnnnnnnnnnnnnnnnnnnnnnnnnnnnnnnnnnnnnnnnnnnnnnnnnnnnnnnnnnnnnnnnnnnnnnnnnnnnnnnnnnnnnnnnnnnnnnnnnnnnnnnnnnnnnnnnnnnnnnnnnnnnnnnnnnnnnnnnnnnnnnnnnnnnnnnnnnnnnnnnnnnnnnnnnnnnnnnnnnnnnnnnnnnnnnnnnnnnnnnnnnnnnnnnnnnnnnnnnnnnnnnnnnnnnnnnnnnnnnnnnnnnnnnnnnnnnnnnnnnnnnnnnnnnnnnnnnnnnnnnnnnnnnnnnnnnnnnnnnnnnnnnnnnnnnnnnnnnnnnnnnnnnnnnnnnnnnnnnnnnnnnnnnnnnnnnnnnnnnnnnnnnnnnnnnnnnnnnnnnnnnnnnnnnnnnnnnnnnnnnnnnnnnnnnnnnnnnnnnnnnnnnnnnnnnnnnnnnnnnnnnnnnnnnnnnnnnnnnnnnnnnnnnnnnnnnnnnnnnnnnnnnnnnnnnnnnnnnnnnnnnnnnnnnnnnnnnnnnnnnnnnnnnnnnnnnnnnnnnnnnnnnnnnnnnnnnnnnnnnnnnnnnnnnnnnnnnnnnnnnnnnnnnnnnnnnnnnnnnnnnnnnnnnnnnnnnnnnnnnnnnnnnnnnnnnnnnnnnnnnnnnnnnnnnnnnnnnnnnnnnnnnnnnnnnnnnnnnnnnnnnnnnnnnnnnnnnnnnnnnnnnnnnnnnnnnnnnnnnnnnnnnnnnnnnnnnnnnnnnnnnnnnnnnnnnnnnnnnnnnnnnnnnnnnnnnnnnnnnnnnnnnnnnnnnnnnnnnnnnnnnnnnnnnnnnnnnnnnnnnnnnnnnnnnnnnnnnnnnnnnnnnnnnnnnnnnnnnnnnnnnnnnnnnnnnnnnnnnnnnnnnnnnnnnnnnnnnnnnnnnnnnnnnnnnnnnnnnnnnnnnnnnnnnnnnnnnnnnnnnnnnnnnnnnnnnnnnnnnnnnnnnnnnnnnnnnnnnnnnnnnnnnnnnnnnnnnnnnnnnnnnnnnnnnnnnnnnnnnnnnnnnnnnnnnnnnnnnnnnnnnnnnnnnnnnnnnnnnnnnnnnnnnnnnnnnnnnnnnnnnnnnnnnnnnnnnnnnnnnnnnnnnnnnnnnnnnnnnnnnnnnnnnnnnnnnnnnnnnnnnnnnnnnnnnnnnnnnnnnnnnnnnnnnnnnnnnnnnnnnnnnnnnnnnnnnnnnnnnnnnnnnnnnnnnnnnnnnnnnnnnnnnnnnnnnnnnnnnnnnnnnnnnnnnnnnnnnnnnnnnnnnnnnnnnnnnnnnnnnnnnnnnnnnnnnnnnnnnnnnnnnnnnnnnnnnnnnnnnnnnnnnnnnnnnnnnnnnnnnnnnnnnnnnnnnnnnnnnnnnnnnnnnnnnnnnnnnnnnnnnnnnnnnnnnnnnnnnnnnnnnnnnnnnnnnnnnnnnnnnnnnnnnnnnnnnnnnnnnnnnnnnnnnnnnnnnnnnnnnnnnnnnnnnnnnnnnnnnnnnnnnnnnnnnnnnnnnnnnnnnnnnnnnnnnnnnnnnnnnnnnnnnnnnnnnnnnnnnnnnnnnnnnnnnnnnnnnnnnnnnnnnnnnnnnnnnnnnnnnnnnnnnnnnnnnnnnnnnnnnnnnnnnnnnnnnnnnnnnnnnnnnnnnnnnnnnnnnnnnnnnnnnnnnnnnnnnnnnnnnnnnnnnnnnnnnnnnnnnnnnnnnnnnnnnnnnnnnnnnnnnnnnnnnnnnnnnnnnnnnnnnnnnnnnnnnnnnnnnnnnnnnnnnnnnnnnnnnnnnnnnnnnnnnnnnnnnnnnnnnnnnnnnnnnnnnnnnnnnnnnnnnnnnnnnnnnnnnnnnnnnnnnnnnnnnnnnnnnnnnnnnnnnnnnnnnnnnnnnnnnnnnnnnnnnnnnnnnnnnnnnnnnnnnnnnnnnnnnnnnnnnnnnnnnnnnnnnnnnnnnnnnnnnnnnnnnnnnnnnnnnnnnnnnnnnnnnnnnnnnnnnnnnnnnnnnnnnnnnnnnnnnnnnnnnnnnnnnnnnnnnnnnnnnnnnnnnnnnnnnnnnnnnnnnnnnnnnnnnnnnnnnnnnnnnnnnnnnnnnnnnnnnnnnnnnnnnnnnnnnnnnnnnnnnnnnnnnnnnnnnnnnnnnnnnnnnnnnnnnnnnnnnnnnnnnnnnnnnnnnnnnnnnnnnnnnnnnnnnnnnnnnnnnnnnnnnnnnnnnnnnnnnnnnnnnnnnnnnnnnnnnnnnnnnnnnnnnnnnnnnnnnnnnnnnnnnnnnnnnnnnnnnnnnnnnnnnnnnnnnnnnnnnnnnnnnnnnnnnnnnnnnnnnnnnnnnnnnnnnnnnnnnnnnnnnnnnnnnnnnnnnnnnnnnnnnnnnnnnnnnnnnnnnnnnnnnnnnnnnnnnnnnnnnnnnnnnnnnnnnnnnnnnnnnnnnnnnnnnnnnnnnnnnnnnnnnnnnnnnnnnnnnnnnnnnnnnnnnnnnnnnnnnnnnnnnnnnnnnnnnnnnnnnnnnnnnnnnnnnnnnnnnnnnnnnnnnnnnnnnnnnnnnnnnnnnnnnnnnnnnnnnnnnnnnnnnnnnnnnnnnnnnnnnnnnnnnnnnnnnnnnnnnnnnnnnnnnnnnnnnnnnnnnnnnnnnnnnnnnnnnnnnnnnnnnnnnnnnnnnnnnnnnnnnnnnnnnnnnnnnnnnnnnnnnnnnnnnnnnnnnnnnnnnnnnnnnnnnnnnnnnnnnnnnnnnnnnnnnnnnnnnnnnnnnnnnnnnnnnnnnnnnnnnnnnnnnnnnnnnnnnnnnnnnnnnnnnnnnnnnnnnnnnnnnnnnnnnnnnnnnnnnnnnnnnnnnnnnnnnnnnnnnnnnnnnnnnnnnnnnnnnnnnnnnnnnnnnnnnnnnnnnnnnnnnnnnnnnnnnnnnnnnnnnnnnnnnnnnnnnnnnnnnnnnnnnnnnnnnnnnnnnnnnnnnnnnnnnnnnnnnnnnnnnnnnnnnnnnnnnnnnnnnnnnnnnnnnnnnnnnnnnnnnnnnnnnnnnnnnnnnnnnnnnnnnnnnnnnnnnnnnnnnnnnnnnnnnnnnnnnnnnnnnnnnnnnnnnnnnnnnnnnnnnnnnnnnnnnnnnnnnnnnnnnnnnnnnnnnnnnnnnnnnnnnnnnnnnnnnnnnnnnnnnnnnnnnnnnnnnnnnnnnnnnnnnnnnnnnnnnnnnnnnnnnnnnnnnnnnnnnnnnnnnnnnnnnnnnnnnnnnnnnnnnnnnnnnnnnnnnnnnnnnnnnnnnnnnnnnnnnnnnnnnnnnnnnnnnnnnnnnnnnnnnnnnnnnnnnnnnnnnnnnnnnnnnnnnnnnnnnnnnnnnnnnnnnnnnnnnnnnnnnnnnnnnnnnnnnnnnnnnnnnnnnnnnnnnnnnnnnnnnnnnnnnnnnnnnnnnnnnnnnnnnnnnnnnnnnnnnnnnnnnnnnnnnnnnnnnnnnnnnnnnnnnnnnnnnnnnnnnnnnnnnnnnnnnnnnnnnnnnnnnnnnnnnnnnnnnnnnnnnnnnnnnnnnnnnnnnnnnnnnnnnnnnnnnnnnnnnnnnnnnnnnnnnnnnnnnnnnnnnnnnnnnnnnnnnnnnnnnnnnnnnnnnnnnnnnnnnnnnnnnnnnnnnnnnnnnnnnnnnnnnnnnnnnnnnnnnnnnnnnnnnnnnnnnnnnnnnnnnnnnnnnnnnnnnnnnnnnnnnnnnnnnnnnnnnnnnnnnnnnnnnnnnnnnnnnnnnnnnnnnnnnnnnnnnnnnnnnnnnnnnnnnnnnnnnnnnnnnnnnnnnnnnnnnnnnnnnnnnnnnnnnnnnnnnnnnnnnnnnnnnnnnnnnnnnnnnnnnnnnnnnnnnnnnnnnnnnnnnnnnnnnnnnnnnnnnnnnnnnnnnnnnnnnnnnnnnnnnnnnnnnnnnnnnnnnnnnnnnnnnnnnnnnnnnnnnnnnnnnnnnnnnnnnnnnnnnnnnnnnnnnnnnnnnnnnnnnnnnnnnnnnnnnnnnnnnnnnnnnnnnnnnnnnnnnnnnnnnnnnnnnnnnnnnnnnnnnnnnnnnnnnnnnnnnnnnnnnnnnnnnnnnnnnnnnnnnnnnnnnnnnnnnnnnnnnnnnnnnnnnnnnnnnnnnnnnnnnnnnnnnnnnnnnnnnnnnnnnnnnnnnnnnnnnnnnnnnnnnnnnnnnnnnnnnnnnnnnnnnnnnnnnnnnnnnnnnnnnnnnnnnnnnnnnnnnnnnnnnnnnnnnnnnnnnnnnnnnnnnnnnnnnnnnnnnnnnnnnnnnnnnnnnnnnnnnnnnnnnnnnnnnnnnnnnnnnnnnnnnnnnnnnnnnnnnnnnnnnnnnnnnnnnnnnnnnnnnnnnnnnnnnnnnnnnnnnnnnnnnnnnnnnnnnnnnnnnnnnnnnnnnnnnnnnnnnnnnnnnnnnnnnnnnnnnnnnnnnnnnnnnnnnnnnnnnnnnnnnnnnnnnnnnnnnnnnnnnnnnnnnnnnnnnnnnnnnnnnnnnnnnnnnnnnnnnnnnnnnnnnnnnnnnnnnnnnnnnnnnnnnnnnnnnnnnnnnnnnnnnnnnnnnnnnnnnnnnnnnnnnnnnnnnnnnnnnnnnnnnnnnnnnnnnnnnnnnnnnnnnnnnnnnnnnnnnnnnnnnnnnnnnnnnnnnnnnnnnnnnnnnnnnnnnnnnnnnnnnnnnnnnnnnnnnnnnnnnnnnnnnnnnnnnnnnnnnnnnnnnnnnnnnnnnnnnnnnnnnnnnnnnnnnnnnnnnnnnnnnnnnnnnnnnnnnnnnnnnnnnnnnnnnnnnnnnnnnnnnnnnnnnnnnnnnnnnnnnnnnnnnnnnnnnnnnnnnnnnnnnnnnnnnnnnnnnnnnnnnnnnnnnnnnnnnnnnnnnnnnnnnnnnnnnnnnnnnnnnnnnnnnnnnnnnnnnnnnnnnnnnnnnnnnnnnnnnnnnnnnnnnnnnnnnnnnnnnnnnnnnnnnnnnnnnnnnnnnnnnnnnnnnnnnnnnnnnnnnnnnnnnnnnnnnnnnnnnnnnnnnnnnnnnnnnnnnnnnnnnnnnnnnnnnnnnnnnnnnnnnnnnnnnnnnnnnnnnnnnnnnnnnnnnnnnnnnnnnnnnnnnnnnnnnnnnnnnnnnnnnnnnnnnnnnnnnnnnnnnnnnnnnnnnnnnnnnnnnnnnnnnnnnnnnnnnnnnnnnnnnnnnnnnnnnnnnnnnnnnnnnnnnnnnnnnnnnnnnnnnnnnnnnnnnnnnnnnnnnnnnnnnnnnnnnnnnnnnnnnnnnnnnnnnnnnnnnnnnnnnnnnnnnnnnnnnnnnnnnnnnnnnnnnnnnnnnnnnnnnnnnnnnnnnnnnnnnnnnnnnnnnnnnnnnnnnnnnnnnnnnnnnnnnnnnnnnnnnnnnnnnnnnnnnnnnnnnnnnnnnnnnnnnnnnnnnnnnnnnnnnnnnnnnnnnnnnnnnnnnnnnnnnnnnnnnnnnnnnnnnnnnnnnnnnnnnnnnnnnnnnnnnnnnnnnnnnnnnnnnnnnnnnnnnnnnnnnnnnnnnnnnnnnnnnnnnnnnnnnnnnnnnnnnnnnnnnnnnnnnnnnnnnnnnnnnnnnnnnnnnnnnnnnnnnnnnnnnnnnnnnnnnnnnnnnnnnnnnnnnnnnnnnnnnnnnnnnnnnnnnnnnnnnnnnnnnnnnnnnnnnnnnnnnnnnnnnnnnnnnnnnnnnnnnnnnnnnnnnnnnnnnnnnnnnnnnnnnnnnnnnnnnnnnnnnnnnnnnnnnnnnnnnnnnnnnnnnnnnnnnnnnnnnnnnnnnnnnnnnnnnnnnnnnnnnnnnnnnnnnnnnnnnnnnnnnnnnnnnnnnnnnnnnnnnnnnnnnnnnnnnnnnnnnnnnnnnnnnnnnnnnnnnnnnnnnnnnnnnnnnnnnnnnnnnnnnnnnnnnnnnnnnnnnnnnnnnnnnnnnnnnnnnnnnnnnnnnnnnnnnnnnnnnnnnnnnnnnnnnnnnnnnnnnnnnnnnnnnnnnnnnnnnnnnnnnnnnnnnnnnnnnnnnnnnnnnnnnnnnnnnnnnnnnnnnnnnnnnnnnnnnnnnnnnnnnnnnnnnnnnnnnnnnnnnnnnnnnnnnnnnnnnnnnnnnnnnnnnnnnnnnnnnnnnnnnnnnnnnnnnnnnnnnnnnnnnnnnnnnnnnnnnnnnnnnnnnnnnnnnnnnnnnnnnnnnnnnnnnnnnnnnnnnnnnnnnnnnnnnnnnnnnnnnnnnnnnnnnnnnnnnnnnnnnnnnnnnnnnnnnnnnnnnnnnnnnnnnnnnnnnnnnnnnnnnnnnnnnnnnnnnnnnnnnnnnnnnnnnnnnnnnnnnnnnnnnnnnnnnnnnnnnnnnnnnnnnnnnnnnnnnnnnnnnnnnnnnnnnnnnnnnnnnnnnnnnnnnnnnnnnnnnnnnnnnnnnnnnnnnnnnnnnnnnnnnnnnnnnnnnnnnnnnnnnnnnnnnnnnnnnnnnnnnnnnnnnnnnnnnnnnnnnnnnnnnnnnnnnnnnnnnnnnnnnnnnnnnnnnnnnnnnnnnnnnnnnnnnnnnnnnnnnnnnnnnnnnnnnnnnnnnnnnnnnnnnnnnnnnnnnnnnnnnnnnnnnnnnnnnnnnnnnnnnnnnnnnnnnnnnnnnnnnnnnnnnnnnnnnnnnnnnnnnnnnnnnnnnnnnnnnnnnnnnnnnnnnnnnnnnnnnnnnnnnnnnnnnnnnnnnnnnnnnnnnnnnnnnnnnnnnnnnnnnnnnnnnnnnnnnnnnnnnnnnnnnnnnnnnnnnnnnnnnnnnnnnnnnnnnnnnnnnnnnnnnnnnnnnnnnnnnnnnnnnnnnnnnnnnnnnnnnnnnnnnnnnnnnnnnnnnnnnnnnnnnnnnnnnnnnnnnnnnnnnnnnnnnnnnnnnnnnnnnnnnnnnnnnnnnnnnnnnnnnnnnnnnnnnnnnnnnnnnnnnnnnnnnnnnnnnnnnnnnnnnnnnnnnnnnnnnnnnnnnnnnnnnnnnnnnnnnnnnnnnnnnnnnnnnnnnnnnnnnnnnnnnnnnnnnnnnnnnnnnnnnnnnnnnnnnnnnnnnnnnnnnnnnnnnnnnnnnnnnnnnnnnnnnnnnnnnnnnnnnnnnnnnnnnnnnnnnnnnnnnnnnnnnnnnnnnnnnnnnnnnnnnnnnnnnnnnnnnnnnnnnnnnnnnnnnnnnnnnnnnnnnnnnnnnnnnnnnnnnnnnnnnnnnnnnnnnnnnnnnnnnnnnnnnnnnnnnnnnnnnnnnnnnnnnnnnnnnnnnnnnnnnnnnnnnnnnnnnnnnnnnnnnnnnnnnnnnnnnnnnnnnnnnnnnnnnnnnnnnnnnnnnnnnnnnnnnnnnnnnnnnnnnnnnnnnnnnnnnnnnnnnnnnnnnnnnnnnnnnnnnnnnnnnnnnnnnnnnnnnnnnnnnnnnnnnnnnnnnnnnnnnnnnnnnnnnnnnnnnnnnnnnnnnnnnnnnnnnnnnnnnnnnnnnnnnnnnnnnnnnnnnnnnnnnnnnnnnnnnnnnnnnnnnnnnnnnnnnnnnnnnnnnnnnnnnnnnnnnnnnnnnnnnnnnnnnnnnnnnnnnnnnnnnnnnnnnnnnnnnnnnnnnnnnnnnnnnnnnnnnnnnnnnnnnnnnnnnnnnnnnnnnnnnnnnnnnnnnnnnnnnnnnnnnnnnnnnnnnnnnnnnnnnnnnnnnnnnnnnnnnnnnnnnnnnnnnnnnnnnnnnnnnnnnnnnnnnnnnnnnnnnnnnnnnnnnnnnnnnnnnnnnnnnnnnnnnnnnnnnnnnnnnnnnnnnnnnnnnnnnnnnnnnnnnnnnnnnnnnnnnnnnnnnnnnnnnnnnnnnnnnnnnnnnnnnnnnnnnnnnnnnnnnnnnnnnnnnnnnnnnnnnnnnnnnnnnnnnnnnnnnnnnnnnnnnnnnnnnnnnnnnnnnnnnnnnnnnnnnnnnnnnnnnnnnnnnnnnnnnnnnnnnnnnnnnnnnnnnnnnnnnnnnnnnnnnnnnnnnnnnnnnnnnnnnnnnnnnnnnnnnnnnnnnnnnnnnnnnnnnnnnnnnnnnnnnnnnnnnnnnnnnnnnnnnnnnnnnnnnnnnnnnnnnnnnnnnnnnnnnnnnnnnnnnnnnnnnnnnnnnnnnnnnnnnnnnnnnnnnnnnnnnnnnnnnnnnnnnnnnnnnnnnnnnnnnnnnnnnnnnnnnnnnnnnnnnnnnnnnnnnnnnnnnnnnnnnnnnnnnnnnnnnnnnnnnnnnnnnnnnnnnnnnnnnnnnnnnnnnnnnnnnnnnnnnnnnnnnnnnnnnnnnnnnnnnnnnnnnnnnnnnnnnnnnnnnnnnnnnnnnnnnnnnnnnnnnnnnnnnnnnnnnnnnnnnnnnnnnnnnnnnnnnnnnnnnnnnnnnnnnnnnnnnnnnnnnnnnnnnnnnnnnnnnnnnnnnnnnnnnnnnnnnnnnnnnnnnnnnnnnnnnnnnnnnnnnnnnnnnnnnnnnnnnnnnnnnnnnnnnnnnnnnnnnnnnnnnnnnnnnnnnnnnnnnnnnnnnnnnnnnnnnnnnnnnnnnnnnnnnnnnnnnnnnnnnnnnnnnnnnnnnnnnnnnnnnnnnnnnnnnnnnnnnnnnnnnnnnnnnnnnnnnnnnnnnnnnnnnnnnnnnnnnnnnnnnnnnnnnnnnnnnnnnnnnnnnnnnnnnnnnnnnnnnnnnnnnnnnnnnnnnnnnnnnnnnnnnnnnnnnnnnnnnnnnnnnnnnnnnnnnnnnnnnnnnnnnnnnnnnnnnnnnnnnnnnnnnnnnnnnnnnnnnnnnnnnnnnnnnnnnnnnnnnnnnnnnnnnnnnnnnnnnnnnnnnnnnnnnnnnnnnnnnnnnnnnnnnnnnnnnnnnnnnnnnnnnnnnnnnnnnnnnnnnnnnnnnnnnnnnnnnnnnnnnnnnnnnnnnnnnnnnnnnnnnnnnnnnnnnnnnnnnnnnnnnnnnnnnnnnnnnnnnnnnnnnnnnnnnnnnnnnnnnnnnnnnnnnnnnnnnnnnnnnnnnnnnnnnnnnnnnnnnnnnnnnnnnnnnnnnnnnnnnnnnnnnnnnnnnnnnnnnnnnnnnnnnnnnnnnnnnnnnnnnnnnnnnnnnnnnnnnnnnnnnnnnnnnnnnnnnnnnnnnnnnnnnnnnnnnnnnnnnnnnnnnnnnnnnnnnnnnnnnnnnnnnnnnnnnnnnnnnnnnnnnnnnnnnnnnnnnnnnnnnnnnnnnnnnnnnnnnnnnnnnnnnnnnnnnnnnnnnnnnnnnnnnnnnnnnnnnnnnnnnnnnnnnnnnnnnnnnnnnnnnnnnnnnnnnnnnnnnnnnnnnnnnnnnnnnnnnnnnnnnnnnnnnnnnnnnnnnnnnnnnnnnnnnnnnnnnnnnnnnnnnnnnnnnnnnnnnnnnnnnnnnnnnnnnnnnnnnnnnnnnnnnnnnnnnnnnnnnnnnnnnnnnnnnnnnnnnnnnnnnnnnnnnnnnnnnnnnnnnnnnnnnnnnnnnnnnnnnnnnnnnnnnnnnnnnnnnnnnnnnnnnnnnnnnnnnnnnnnnnnnnnnnnnnnnnnnnnnnnnnnnnnnnnnnnnnnnnnnnnnnnnnnnnnnnnnnnnnnnnnnnnnnnnnnnnnnnnnnnnnnnnnnnnnnnnnnnnnnnnnnnnnnnnnnnnnnnnnnnnnnnnnnnnnnnnnnnnnnnnnnnnnnnnnnnnnnnnnnnnnnnnnnnnnnnnnnnnnnnnnnnnnnnnnnnnnnnnnnnnnnnnnnnnnnnnnnnnnnnnnnnnnnnnnnnnnnnnnnnnnnnnnnnnnnnnnnnnnnnnnnnnnnnnnnnnnnnnnnnnnnnnnnnnnnnnnnnnnnnnnnnnnnnnnnnnnnnnnnnnnnnnnnnnnnnnnnnnnnnnnnnnnnnnnnnnnnnnnnnnnnnnnnnnnnnnnnnnnnnnnnnnnnnnnnnnnnnnnnnnnnnnnnnnnnnnnnnnnnnnnnnnnnnnnnnnnnnnnnnnnnnnnnnnnnnnnnnnnnnnnnnnnnnnnnnnnnnnnnnnnnnnnnnnnnnnnnnnnnnnnnnnnnnnnnnnnnnnnnnnnnnnnnnnnnnnnnnnnnnnnnnnnnnnnnnnnnnnnnnnnnnnnnnnnnnnnnnnnnnnnnnnnnnnnnnnnnnnnnnnnnnnnnnnnnnnnnnnnnnnnnnnnnnnnnnnnnnnnnnnnnnnnnnnnnnnnnnnnnnnnnnnnnnnnnnnnnnnnnnnnnnnnnnnnnnnnnnnnnnnnnnnnnnnnnnnnnnnnnnnnnnnnnnnnnnnnnnnnnnnnnnnnnnnnnnnnnnnnnnnnnnnnnnnnnnnnnnnnnnnnnnnnnnnnnnnnnnnnnnnnnnnnnnnnnnnnnnnnnnnnnnnnnnnnnnnnnnnnnnnnnnnnnnnnnnnnnnnnnnnnnnnnnnnnnnnnnnnnnnnnnnnnnnnnnnnnnnnnnnnnnnnnnnnnnnnnnnnnnnnnnnnnnnnnnnnnnnnnnnnnnnnnnnnnnnnnnnnnnnnnnnnnnnnnnnnnnnnnnnnnnnnnnnnnnnnnnnnnnnnnnnnnnnnnnnnnnnnnnnnnnnnnnnnnnnnnnnnnnnnnnnnnnnnnnnnnnnnnnnnnnnnnnnnnnnnnnnnnnnnnnnnnnnnnnnnnnnnnnnnnnnnnnnnnnnnnnnnnnnnnnnnnnnnnnnnnnnnnnnnnnnnnnnnnnnnnnnnnnnnnnnnnnnnnnnnnnnnnnnnnnnnnnnnnnnnnnnnnnnnnnnnnnnnnnnnnnnnnnnnnnnnnnnnnnnnnnnnnnnnnnnnnnnnnnnnnnnnnnnnnnnnnnnnnnnnnnnnnnnnnnnnnnnnnnnnnnnnnnnnnnnnnnnnnnnnnnnnnnnnnnnnnnnnnnnnnnnnnnnnnnnnnnnnnnnnnnnnnnnnnnnnnnnnnnnnnnnnnnnnnnnnnnnnnnnnnnnnnnnnnnnnnnnnnnnnnnnnnnnnnnnnnnnnnnnnnnnnnnnnnnnnnnnnnnnnnnnnnnnnnnnnnnnnnnnnnnnnnnnnnnnnnnnnnnnnnnnnnnnnnnnnnnnnnnnnnnnnnnnnnnnnnnnnnnnnnnnnnnnnnnnnnnnnnnnnnnnnnnnnnnnnnnnnnnnnnnnnnnnnnnnnnnnnnnnnnnnnnnnnnnnnnnnnnnnnnnnnnnnnnnnnnnnnnnnnnnnnnnnnnnnnnnnnnnnnnnnnnnnnnnnnnnnnnnnnnnnnnnnnnnnnnnnnnnnnnnnnnnnnnnnnnnnnnnnnnnnnnnnnnnnnnnnnnnnnnnnnnnnnnnnnnnnnnnnnnnnnnnnnnnnnnnnnnnnnnnnnnnnnnnnnnnnnnnnnnnnnnnnnnnnnnnnnnnnnnnnnnnnnnnnnnnnnnnnnnnnnnnnnnnnnnnnnnnnnnnnnnnnnnnnnnnnnnnnnnnnnnnnnnnnnnnnnnnnnnnnnnnnnnnnnnnnnnnnnnnnnnnnnnnnnnnnnnnnnnnnnnnnnnnnnnnnnnnnnnnnnnnnnnnnnnnnnnnnnnnnnnnnnnnnnnnnnnnnnnnnnnnnnnnnnnnnnnnnnnnnnnnnnnnnnnnnnnnnnnnnnnnnnnnnnnnnnnnnnnnnnnnnnnnnnnnnnnnnnnnnnnnnnnnnnnnnnnnnnnnnnnnnnnnnnnnnnnnnnnnnnnnnnnnnnnnnnnnnnnnnnnnnnnnnnnnnnnnnnnnnnnnnnnnnnnnnnnnnnnnnnnnnnnnnnnnnnnnnnnnnnnnnnnnnnnnnnnnnnnnnnnnnnnnnnnnnnnnnnnnnnnnnnnnnnnnnnnnnnnnnnnnnnnnnnnnnnnnnnnnnnnnnnnnnnnnnnnnnnnnnnnnnnnnnnnnnnnnnnnnnnnnnnnnnnnnnnnnnnnnnnnnnnnnnnnnnnnnnnnnnnnnnnnnnnnnnnnnnnnnnnnnnnnnnnnnnnnnnnnnnnnnnnnnnnnnnnnnnnnnnnnnnnnnnnnnnnnnnnnnnnnnnnnnnnnnnnnnnnnnnnnnnnnnnnnnnnnnnnnnnnnnnnnnnnnnnnnnnnnnnnnnnnnnnnnnnnnnnnnnnnnnnnnnnnnnnnnnnnnnnnnnnnnnnnnnnnnnnnnnnnnnnnnnnnnnnnnnnnnnnnnnnnnnnnnnnnnnnnnnnnnnnnnnnnnnnnnnnnnnnnnnnnnnnnnnnnnnnnnnnnnnnnnnnnnnnnnnnnnnnnnnnnnnnnnnnnnnnnnnnnnnnnnnnnnnnnnnnnnnnnnnnnnnnnnnnnnnnnnnnnnnnnnnnnnnnnnnnnnnnnnnnnnnnnnnnnnnnnnnnnnnnnnnnnnnnnnnnnnnnnnnnnnnnnnnnnnnnnnnnnnnnnnnnnnnnnnnnnnnnnnnnnnnnnnnnnnnnnnnnnnnnnnnnnnnnnnnnnnnnnnnnnnnnnnnnnnnnnnnnnnnnnnnnnnnnnnnnnnnnnnnnnnnnnnnnnnnnnnnnnnnnnnnnnnnnnnnnnnnnnnnnnnnnnnnnnnnnnnnnnnnnnnnnnnnnnnnnnnnnnnnnnnnnnnnnnnnnnnnnnnnnnnnnnnnnnnnnnnnnnnnnnnnnnnnnnnnnnnnnnnnnnnnnnnnnnnnnnnnnnnnnnnnnnnnnnnnnnnnnnnnnnnnnnnnnnnnnnnnnnnnnnnnnnnnnnnnnnnnnnnnnnnnnnnnnnnnnnnnnnnnnnnnnnnnnnnnnnnnnnnnnnnnnnnnnnnnnnnnnnnnnnnnnnnnnnnnnnnnnnnnnnnnnnnnnnnnnnnnnnnnnnnnnnnnnnnnnnnnnnnnnnnnnnnnnnnnnnnnnnnnnnnnnnnnnnnnnnnnnnnnnnnnnnnnnnnnnnnnnnnnnnnnnnnnnnnnnnnnnnnnnnnnnnnnnnnnnnnnnnnnnnnnnnnnnnnnnnnnnnnnnnnnnnnnnnnnnnnnnnnnnnnnnnnnnnnnnnnnnnnnnnnnnnnnnnnnnnnnnnnnnnnnnnnnnnnnnnnnnnnnnnnnnnnnnnnnnnnnnnnnnnnnnnnnnnnnnnnnnnnnnnnnnnnnnnnnnnnnnnnnnnnnnnnnnnnnnnnnnnnnnnnnnnnnnnnnnnnnnnnnnnnnnnnnnnnnnnnnnnnnnnnnnnnnnnnnnnnnnnnnnnnnnnnnnnnnnnnnnnnnnnnnnnnnnnnnnnnnnnnnnnnnnnnnnnnnnnnnnnnnnnnnnnnnnnnnnnnnnnnnnnnnnnnnnnnnnnnnnnnnnnnnnnnnnnnnnnnnnnnnnnnnnnnnnnnnnnnnnnnnnnnnnnnnnnnnnnnnnnnnnnnnnnnnnnnnnnnnnnnnnnnnnnnnnnnnnnnnnnnnnnnnnnnnnnnnnnnnnnnnnnnnnnnnnnnnnnnnnnnnnnnnnnnnnnnnnnnnnnnnnnnnnnnnnnnnnnnnnnnnnnnnnnnnnnnnnnnnnnnnnnnnnnnnnnnnnnnnnnnnnnnnnnnnnnnnnnnnnnnnnnnnnnnnnnnnnnnnnnnnnnnnnnnnnnnnnnnnnnnnnnnnnnnnnnnnnnnnnnnnnnnnnnnnnnnnnnnnnnnnnnnnnnnnnnnnnnnnnnnnnnnnnnnnnnnnnnnnnnnnnnnnnnnnnnnnnnnnnnnnnnnnnnnnnnnnnnnnnnnnnnnnnnnnnnnnnnnnnnnnnnnnnnnnnnnnnnnnnnnnnnnnnnnnnnnnnnnnnnnnnnnnnnnnnnnnnnnnnnnnnnnnnnnnnnnnnnnnnnnnnnnnnnnnnnnnnnnnnnnnnnnnnnnnnnnnnnnnnnnnnnnnnnnnnnnnnnnnnnnnnnnnnnnnnnnnnnnnnnnnnnnnnnnnnnnnnnnnnnnnnnnnnnnnnnnnnnnnnnnnnnnnnnnnnnnnnnnnnnnnnnnnnnnnnnnnnnnnnnnnnnnnnnnnnnnnnnnnnnnnnnnnnnnnnnnnnnnnnnnnnnnnnnnnnnnnnnnnnnnnnnnnnnnnnnnnnnnnnnnnnnnnnnnnnnnnnnnnnnnnnnnnnnnnnnnnnnnnnnnnnnnnnnnnnnnnnnnnnnnnnnnnnnnnnnnnnnnnnnnnnnnnnnnnnnnnnnnnnnnnnnnnnnnnnnnnnnnnnnnnnnnnnnnnnnnnnnnnnnnnnnnnnnnnnnnnnnnnnnnnnnnnnnnnnnnnnnnnnnnnnnnnnnnnnnnnnnnnnnnnnnnnnnnnnnnnnnnnnnnnnnnnnnnnnnnnnnnnnnnnnnnnnnnnnnnnnnnnnnnnnnnnnnnnnnnnnnnnnnnnnnnnnnnnnnnnnnnnnnnnnnnnnnnnnnnnnnnnnnnnnnnnnnnnnnnnnnnnnnnnnnnnnnnnnnnnnnnnnnnnnnnnnnnnnnnnnnnnnnnnnnnnnnnnnnnnnnnnnnnnnnnnnnnnnnnnnnnnnnnnnnnnnnnnnnnnnnnnnnnnnnnnnnnnnnnnnnnnnnnnnnnnnnnnnnnnnnnnnnnnnnnnnnnnnnnnnnnnnnnnnnnnnnnnnnnnnnnnnnnnnnnnnnnnnnnnnnnnnnnnnnnnnnnnnnnnnnnnnnnnnnnnnnnnnnnnnnnnnnnnnnnnnnnnnnnnnnnnnnnnnnnnnnnnnnnnnnnnnnnnnnnnnnnnnnnnnnnnnnnnnnnnnnnnnnnnnnnnnnnnnnnnnnnnnnnnnnnnnnnnnnnnnnnnnnnnnnnnnnnnnnnnnnnnnnnnnnnnnnnnnnnnnnnnnnnnnnnnnnnnnnnnnnnnnnnnnnnnnnnnnnnnnnnnnnnnnnnnnnnnnnnnnnnnnnnnnnnnnnnnnnnnnnnnnnnnnnnnnnnnnnnnnnnnnnnnnnnnnnnnnnnnnnnnnnnnnnnnnnnnnnnnnnnnnnnnnnnnnnnnnnnnnnnnnnnnnnnnnnnnnnnnnnnnnnnnnnnnnnnnnnnnnnnnnnnnnnnnnnnnnnnnnnnnnnnnnnnnnnnnnnnnnnnnnnnnnnnnnnnnnnnnnnnnnnnnnnnnnnnnnnnnnnnnnnnnnnnnnnnnnnnnnnnnnnnnnnnnnnnnnnnnnnnnnnnnnnnnnnnnnnnnnnnnnnnnnnnnnnnnnnnnnnnnnnnnnnnnnnnnnnnnnnnnnnnnnnnnnnnnnnnnnnnnnnnnnnnnnnnnnnnnnnnnnnnnnnnnnnnnnnnnnnnnnnnnnnnnnnnnnnnnnnnnnnnnnnnnnnnnnnnnnnnnnnnnnnnnnnnnnnnnnnnnnnnnnnnnnnnnnnnnnnnnnnnnnnnnnnnnnnnnnnnnnnnnnnnnnnnnnnnnnnnnnnnnnnnnnnnnnnnnnnnnnnnnnnnnnnnnnnnnnnnnnnnnnnnnnnnnnnnnnnnnnnnnnnnnnnnnnnnnnnnnnnnnnnnnnnnnnnnnnnnnnnnnnnnnnnnnnnnnnnnnnnnnnnnnnnnnnnnnnnnnnnnnnnnnnnnnnnnnnnnnnnnnnnnnnnnnnnnnnnnnnnnnnnnnnnnnnnnnnnnnnnnnnnnnnnnnnnnnnnnnnnnnnnnnnnnnnnnnnnnnnnnnnnnnnnnnnnnnnnnnnnnnnnnnnnnnnnnnnnnnnnnnnnnnnnnnnnnnnnnnnnnnnnnnnnnnnnnnnnnnnnnnnnnnnnnnnnnnnnnnnnnnnnnnnnnnnnnnnnnnnnnnnnnnnnnnnnnnnnnnnnnnnnnnnnnnnnnnnnnnnnnnnnnnnnnnnnnnnnnnnnnnnnnnnnnnnnnnnnnnnnnnnnnnnnnnnnnnnnnnnnnnnnnnnnnnnnnnnnnnnnnnnnnnnnnnnnnnnnnnnnnnnnnnnnnnnnnnnnnnnnnnnnnnnnnnnnnnnnnnnnnnnnnnnnnnnnnnnnnnnnnnnnnnnnnnnnnnnnnnnnnnnnnnnnnnnnnnnnnnnnnnnnnnnnnnnnnnnnnnnnnnnnnnnnnnnnnnnnnnnnnnnnnnnnnnnnnnnnnnnnnnnnnnnnnnnnnnnnnnnnnnnnnnnnnnnnnnnnnnnnnnnnnnnnnnnnnnnnnnnnnnnnnnnnnnnnnnnnnnnnnnnnnnnnnnnnnnnnnnnnnnnnnnnnnnnnnnnnnnnnnnnnnnnnnnnnnnnnnnnnnnnnnnnnnnnnnnnnnnnnnnnnnnnnnnnnnnnnnnnnnnnnnnnnnnnnnnnnnnnnnnnnnnnnnnnnnnnnnnnnnnnnnnnnnnnnnnnnnnnnnnnnnnnnnnnnnnnnnnnnnnnnnnnnnnnnnnnnnnnnnnnnnnnnnnnnnnnnnnnnnnnnnnnnnnnnnnnnnnnnnnnnnnnnnnnnnnnnnnnnnnnnnnnnnnnnnnnnnnnnnnnnnnnnnnnnnnnnnnnnnnnnnnnnnnnnnnnnnnnnnnnnnnnnnnnnnnnnnnnnnnnnnnnnnnnnnnnnnnnnnnnnnnnnnnnnnnnnnnnnnnnnnnnnnnnnnnnnnnnnnnnnnnnnnnnnnnnnnnnnnnnnnnnnnnnnnnnnnnnnnnnnnnnnnnnnnnnnnnnnnnnnnnnnnnnnnnnnnnnnnnnnnnnnnnnnnnnnnnnnnnnnnnnnnnnnnnnnnnnnnnnnnnnnnnnnnnnnnnnnnnnnnnnnnnnnnnnnnnnnnnnnnnnnnnnnnnnnnnnnnnnnnnnnnnnnnnnnnnnnnnnnnnnnnnnnnnnnnnnnnnnnnnnnnnnnnnnnnnnnnnnnnnnnnnnnnnnnnnnnnnnnnnnnnnnnnnnnnnnnnnnnnnnnnnnnnnnnnnnnnnnnnnnnnnnnnnnnnnnnnnnnnnnnnnnnnnnnnnnnnnnnnnnnnnnnnnnnnnnnnnnnnnnnnnnnnnnnnnnnnnnnnnnnnnnnnnnnnnnnnnnnnnnnnnnnnnnnnnnnnnnnnnnnnnnnnnnnnnnnnnnnnnnnnnnnnnnnnnnnnnnnnnnnnnnnnnnnnnnnnnnnnnnnnnnnnnnnnnnnnnnnnnnnnnnnnnnnnnnnnnnnnnnnnnnnnnnnnnnnnnnnnnnnnnnnnnnnnnnnnnnnnnnnnnnnnnnnnnnnnnnnnnnnnnnnnnnnnnnnnnnnnnnnnnnnnnnnnnnnnnnnnnnnnnnnnnnnnnnnnnnnnnnnnnnnnnnnnnnnnnnnnnnnnnnnnnnnnnnnnnnnnnnnnnnnnnnnnnnnnnnnnnnnnnnnnnnnnnnnnnnnnnnnnnnnnnnnnnnnnnnnnnnnnnnnnnnnnnnnnnnnnnnnnnnnnnnnnnnnnnnnnnnnnnnnnnnnnnnnnnnnnnnnnnnnnnnnnnnnnnnnnnnnnnnnnnnnnnnnnnnnnnnnnnnnnnnnnnnnnnnnnnnnnnnnnnnnnnnnnnnnnnnnnnnnnnnnnnnnnnnnnnnnnnnnnnnnnnnnnnnnnnnnnnnnnnnnnnnnnnnnnnnnnnnnnnnnnnnnnnnnnnnnnnnnnnnnnnnnnnnnnnnnnnnnnnnnnnnnnnnnnnnnnnnnnnnnnnnnnnnnnnnnnnnnnnnnnnnnnnnnnnnnnnnnnnnnnnnnnnnnnnnnnnnnnnnnnnnnnnnnnnnnnnnnnnnnnnnnnnnnnnnnnnnnnnnnnnnnnnnnnnnnnnnnnnnnnnnnnnnnnnnnnnnnnnnnnnnnnnnnnnnnnnnnnnnnnnnnnnnnnnnnnnnnnnnnnnnnnnnnnnnnnnnnnnnnnnnnnnnnnnnnnnnnnnnnnnnnnnnnnnnnnnnnnnnnnnnnnnnnnnnnnnnnnnnnnnnnnnnnnnnnnnnnnnnnnnnnnnnnnnnnnnnnnnnnnnnnnnnnnnnnnnnnnnnnnnnnnnnnnnnnnnnnnnnnnnnnnnnnnnnnnnnnnnnnnnnnnnnnnnnnnnnnnnnnnnnnnnnnnnnnnnnnnnnnnnnnnnnnnnnnnnnnnnnnnnnnnnnnnnnnnnnnnnnnnnnnnnnnnnnnnnnnnnnnnnnnnnnnnnnnnnnnnnnnnnnnnnnnnnnnnnnnnnnnnnnnnnnnnnnnnnnnnnnnnnnnnnnnnnnnnnnnnnnnnnnnnnnnnnnnnnnnnnnnnnnnnnnnnnnnnnnnnnnnnnnnnnnnnnnnnnnnnnnnnnnnnnnnnnnnnnnnnnnnnnnnnnnnnnnnnnnnnnnnnnnnnnnnnnnnnnnnnnnnnnnnnnnnnnnnnnnnnnnnnnnnnnnnnnnnnnnnnnnnnnnnnnnnnnnnnnnnnnnnnnnnnnnnnnnnnnnnnnnnnnnnnnnnnnnnnnnnnnnnnnnnnnnnnnnnnnnnnnnnnnnnnnnnnnnnnnnnnnnnnnnnnnnnnnnnnnnnnnnnnnnnnnnnnnnnnnnnnnnnnnnnnnnnnnnnnnnnnnnnnnnnnnnnnnnnnnnnnnnnnnnnnnnnnnnnnnnnnnnnnnnnnnnnnnnnnnnnnnnnnnnnnnnnnnnnnnnnnnnnnnnnnnnnnnnnnnnnnnnnnnnnnnnnnnnnnnnnnnnnnnnnnnnnnnnnnnnnnnnnnnnnnnnnnnnnnnnnnnnnnnnnnnnnnnnnnnnnnnnnnnnnnnnnnnnnnnnnnnnnnnnnnnnnnnnnnnnnnnnnnnnnnnnnnnnnnnnnnnnnnnnnnnnnnnnnnnnnnnnnnnnnnnnnnnnnnnnnnnnnnnnnnnnnnnnnnnnnnnnnnnnnnnnnnnnnnnnnnnnnnnnnnnnnnnnnnnnnnnnnnnnnnnnnnnnnnnnnnnnnnnnnnnnnnnnnnnnnnnnnnnnnnnnnnnnnnnnnnnnnnnnnnnnnnnnnnnnnnnnnnnnnnnnnnnnnnnnnnnnnnnnnnnnnnnnnnnnnnnnnnnnnnnnnnnnnnnnnnnnnnnnnnnnnnnnnnnnnnnnnnnnnnnnnnnnnnnnnnnnnnnnnnnnnnnnnnnnnnnnnnnnnnnnnnnnnnnnnnnnnnnnnnnnnnnnnnnnnnnnnnnnnnnnnnnnnnnnnnnnnnnnnnnnnnnnnnnnnnnnnnnnnnnnnnnnnnnnnnnnnnnnnnnnnnnnnnnnnnnnnnnnnnnnnnnnnnnnnnnnnnnnnnnnnnnnnnnnnnnnnnnnnnnnnnnnnnnnnnnnnnnnnnnnnnnnnnnnnnnnnnnnnnnnnnnnnnnnnnnnnnnnnnnnnnnnnnnnnnnnnnnnnnnnnnnnnnnnnnnnnnnnnnnnnnnnnnnnnnnnnnnnnnnnnnnnnnnnnnnnnnnnnnnnnnnnnnnnnnnnnnnnnnnnnnnnnnnnnnnnnnnnnnnnnnnnnnnnnnnnnnnnnnnnnnnnnnnnnnnnnnnnnnnnnnnnnnnnnnnnnnnnnnnnnnnnnnnnnnnnnnnnnnnnnnnnnnnnnnnnnnnnnnnnnnnnnnnnnnnnnnnnnnnnnnnnnnnnnnnnnnnnnnnnnnnnnnnnnnnnnnnnnnnnnnnnnnnnnnnnnnnnnnnnnnnnnnnnnnnnnnnnnnnnnnnnnnnnnnnnnnnnnnnnnnnnnnnnnnnnnnnnnnnnnnnnnnnnnnnnnnnnnnnnnnnnnnnnnnnnnnnnnnnnnnnnnnnnnnnnnnnnnnnnnnnnnnnnnnnnnnnnnnnnnnnnnnnnnnnnnnnnnnnnnnnnnnnnnnnnnnnnnnnnnnnnnnnnnnnnnnnnnnnnnnnnnnnnnnnnnnnnnnnnnnnnnnnnnnnnnnnnnnnnnnnnnnnnnnnnnnnnnnnnnnnnnnnnnnnnnnnnnnnnnnnnnnnnnnnnnnnnnnnnnnnnnnnnnnnnnnnnnnnnnnnnnnnnnnnnnnnnnnnnnnnnnnnnnnnnnnnnnnnnnnnnnnnnnnnnnnnnnnnnnnnnnnnnnnnnnnnnnnnnnnnnnnnnnnnnnnnnnnnnnnnnnnnnnnnnnnnnnnnnnnnnnnnnnnnnnnnnnnnnnnnnnnnnnnnnnnnnnnnnnnnnnnnnnnnnnnnnnnnnnnnnnnnnnnnnnnnnnnnnnnnnnnnnnnnnnnnnnnnnnnnnnnnnnnnnnnnnnnnnnnnnnnnnnnnnnnnnnnnnnnnnnnnnnnnnnnnnnnnnnnnnnnnnnnnnnnnnnnnnnnnnnnnnnnnnnnnnnnnnnnnnnnnnnnnnnnnnnnnnnnnnnnnnnnnnnnnnnnnnnnnnnnnnnnnnnnnnnnnnnnnnnnnnnnnnnnnnnnnnnnnnnnnnnnnnnnnnnnnnnnnnnnnnnnnnnnnnnnnnnnnnnnnnnnnnnnnnnnnnnnnnnnnnnnnnnnnnnnnnnnnnnnnnnnnnnnnnnnnnnnnnnnnnnnnnnnnnnnnnnnnnnnnnnnnnnnnnnnnnnnnnnnnnnnnnnnnnnnnnnnnnnnnnnnnnnnnnnnnnnnnnnnnnnnnnnnnnnnnnnnnnnnnnnnnnnnnnnnnnnnnnnnnnnnnnnnnnnnnnnnnnnnnnnnnnnnnnnnnnnnnnnnnnnnnnnnnnnnnnnnnnnnnnnnnnnnnnnnnnnnnnnnnnnnnnnnnnnnnnnnnnnnnnnnnnnnnnnnnnnnnnnnnnnnnnnnnnnnnnnnnnnnnnnnnnnnnnnnnnnnnnnnnnnnnnnnnnnnnnnnnnnnnnnnnnnnnnnnnnnnnnnnnnnnnnnnnnnnnnnnnnnnnnnnnnnnnnnnnnnnnnnnnnnnnnnnnnnnnnnnnnnnnnnnnnnnnnnnnnnnnnnnnnnnnnnnnnnnnnnnnnnnnnnnnnnnnnnnnnnnnnnnnnnnnnnnnnnnnnnnnnnnnnnnnnnnnnnnnnnnnnnnnnnnnnnnnnnnnnnnnnnnnnnnnnnnnnnnnnnnnnnnnnnnnnnnnnnnnnnnnnnnnnnnnnnnnnnnnnnnnnnnnnnnnnnnnnnnnnnnnnnnnnnnnnnnnnnnnnnnnnnnnnnnnnnnnnnnnnnnnnnnnnnnnnnnnnnnnnnnnnnnnnnnnnnnnnnnnnnnnnnnnnnnnnnnnnnnnnnnnnnnnnnnnnnnnnnnnnnnnnnnnnnnnnnnnnnnnnnnnnnnnnnnnnnnnnnnnnnnnnnnnnnnnnnnnnnnnnnnnnnnnnnnnnnnnnnnnnnnnnnnnnnnnnnnnnnnnnnnnnnnnnnnnnnnnnnnnnnnnnnnnnnnnnnnnnnnnnnnnnnnnnnnnnnnnnnnnnnnnnnnnnnnnnnnnnnnnnnnnnnnnnnnnnnnnnnnnnnnnnnnnnnnnnnnnnnnnnnnnnnnnnnnnnnnnnnnnnnnnnnnnnnnnnnnnnnnnnnnnnnnnnnnnnnnnnnnnnnnnnnnnnnnnnnnnnnnnnnnnnnnnnnnnnnnnnnnnnnnnnnnnnnnnnnnnnnnnnnnnnnnnnnnnnnnnnnnnnnnnnnnnnnnnnnnnnnnnnnnnnnnnnnnnnnnnnnnnnnnnnnnnnnnnnnnnnnnnnnnnnnnnnnnnnnnnnnnnnnnnnnnnnnnnnnnnnnnnnnnnnnnnnnnnnnnnnnnnnnnnnnnnnnnnnnnnnnnnnnnnnnnnnnnnnnnnnnnnnnnnnnnnnnnnnnnnnnnnnnnnnnnnnnnnnnnnnnnnnnnnnnnnnnnnnnnnnnnnnnnnnnnnnnnnnnnnnnnnnnnnnnnnnnnnnnnnnnnnnnnnnnnnnnnnnnnnnnnnnnnnnnnnnnnnnnnnnnnnnnnnnnnnnnnnnnnnnnnnnnnnnnnnnnnnnnnnnnnnnnnnnnnnnnnnnnnnnnnnnnnnnnnnnnnnnnnnnnnnnnnnnnnnnnnnnnnnnnnnnnnnnnnnnnnnnnnnnnnnnnnnnnnnnnnnnnnnnnnnnnnnnnnnnnnnnnnnnnnnnnnnnnnnnnnnnnnnnnnnnnnnnnnnnnnnnnnnnnnnnnnnnnnnnnnnnnnnnnnnnnnnnnnnnnnnnnnnnnnnnnnnnnnnnnnnnnnnnnnnnnnnnnnnnnnnnnnnnnnnnnnnnnnnnnnnnnnnnnnnnnnnnnnnnnnnnnnnnnnnnnnnnnnnnnnnnnnnnnnnnnnnnnnnnnnnnnnnnnnnnnnnnnnnnnnnnnnnnnnnnnnnnnnnnnnnnnnnnnnnnnnnnnnnnnnnnnnnnnnnnnnnnnnnnnnnnnnnnnnnnnnnnnnnnnnnnnnnnnnnnnnnnnnnnnnnnnnnnnnnnnnnnnnnnnnnnnnnnnnnnnnnnnnnnnnnnnnnnnnnnnnnnnnnnnnnnnnnnnnnnnnnnnnnnnnnnnnnnnnnnnnnnnnnnnnnnnnnnnnnnnnnnnnnnnnnnnnnnnnnnnnnnnnnnnnnnnnnnnnnnnnnnnnnnnnnnnnnnnnnnnnnnnnnnnnnnnnnnnnnnnnnnnnnnnnnnnnnnnnnnnnnnnnnnnnnnnnnnnnnnnnnnnnnnnnnnnnnnnnnnnnnnnnnnnnnnnnnnnnnnnnnnnnnnnnnnnnnnnnnnnnnnnnnnnnnnnnnnnnnnnnnnnnnnnnnnnnnnnnnnnnnnnnnnnnnnnnnnnnnnnnnnnnnnnnnnnnnnnnnnnnnnnnnnnnnnnnnnnnnnnnnnnnnnnnnnnnnnnnnnnnnnnnnnnnnnnnnnnnnnnnnnnnnnnnnnnnnnnnnnnnnnnnnnnnnnnnnnnnnnnnnnnnnnnnnnnnnnnnnnnnnnnnnnnnnnnnnnnnnnnnnnnnnnnnnnnnnnnnnnnnnnnnnnnnnnnnnnnnnnnnnnnnnnnnnnnnnnnnnnnnnnnnnnnnnnnnnnnnnnnnnnnnnnnnnnnnnnnnnnnnnnnnnnnnnnnnnnnnnnnnnnnnnnnnnnnnnnnnnnnnnnnnnnnnnnnnnnnnnnnnnnnnnnnnnnnnnnnnnnnnnnnnnnnnnnnnnnnnnnnnnnnnnnnnnnnnnnnnnnnnnnnnnnnnnnnnnnnnnnnnnnnnnnnnnnnnnnnnnnnnnnnnnnnnnnnnnnnnnnnnnnnnnnnnnnnnnnnnnnnnnnnnnnnnnnnnnnnnnnnnnnnnnnnnnnnnnnnnnnnnnnnnnnnnnnnnnnnnnnnnnnnnnnnnnnnnnnnnnnnnnnnnnnnnnnnnnnnnnnnnnnnnnnnnnnnnnnnnnnnnnnnnnnnnnnnnnnnnnnnnnnnnnnnnnnnnnnnnnnnnnnnnnnnnnnnnnnnnnnnnnnnnnnnnnnnnnnnnnnnnnnnnnnnnnnnnnnnnnnnnnnnnnnnnnnnnnnnnnnnnnnnnnnnnnnnnnnnnnnnnnnnnnnnnnnnnnnnnnnnnnnnnnnnnnnnnnnnnnnnnnnnnnnnnnnnnnnnnnnnnnnnnnnnnnnnnnnnnnnnnnnnnnnnnnnnnnnnnnnnnnnnnnnnnnnnnnnnnnnnnnnnnnnnnnnnnnnnnnnnnnnnnnnnnnnnnnnnnnnnnnnnnnnnnnnnnnnnnnnnnnnnnnnnnnnnnnnnnnnnnnnnnnnnnnnnnnnnnnnnnnnnnnnnnnnnnnnnnnnnnnnnnnnnnnnnnnnnnnnnnnnnnnnnnnnnnnnnnnnnnnnnnnnnnnnnnnnnnnnnnnnnnnnnnnnnnnnnnnnnnnnnnnnnnnnnnnnnnnnnnnnnnnnnnnnnnnnnnnnnnnnnnnnnnnnnnnnnnnnnnnnnnnnnnnnnnnnnnnnnnnnnnnnnnnnnnnnnnnnnnnnnnnnnnnnnnnnnnnnnnnnnnnnnnnnnnnnnnnnnnnnnnnnnnnnnnnnnnnnnnnnnnnnnnnnnnnnnnnnnnnnnnnnnnnnnnnnnnnnnnnnnnnnnnnnnnnnnnnnnnnnnnnnnnnnnnnnnnnnnnnnnnnnnnnnnnnnnnnnnnnnnnnnnnnnnnnnnnnnnnnnnnnnnnnnnnnnnnnnnnnnnnnnnnnnnnnnnnnnnnnnnnnnnnnnnnnnnnnnnnnnnnnnnnnnnnnnnnnnnnnnnnnnnnnnnnnnnnnnnnnnnnnnnnnnnnnnnnnnnnnnnnnnnnnnnnnnnnnnnnnnnnnnnnnnnnnnnnnnnnnnnnnnnnnnnnnnnnnnnnnnnnnnnnnnnnnnnnnnnnnnnnnnnnnnnnnnnnnnnnnnnnnnnnnnnnnnnnnnnnnnnnnnnnnnnnnnnnnnnnnnnnnnnnnnnnnnnnnnnnnnnnnnnnnnnnnnnnnnnnnnnnnnnnnnnnnnnnnnnnnnnnnnnnnnnnnnnnnnnnnnnnnnnnnnnnnnnnnnnnnnnnnnnnnnnnnnnnnnnnnnnnnnnnnnnnnnnnnnnnnnnnnnnnnnnnnnnnnnnnnnnnnnnnnnnnnnnnnnnnnnnnnnnnnnnnnnnnnnnnnnnnnnnnnnnnnnnnnnnnnnnnnnnnnnnnnnnnnnnnnnnnnnnnnnnnnnnnnnnnnnnnnnnnnnnnnnnnnnnnnnnnnnnnnnnnnnnnnnnnnnnnnnnnnnnnnnnnnnnnnnnnnnnnnnnnnnnnnnnnnnnnnnnnnnnnnnnnnnnnnnnnnnnnnnnnnnnnnnnnnnnnnnnnnnnnnnnnnnnnnnnnnnnnnnnnnnnnnnnnnnnnnnnnnnnnnnnnnnnnnnnnnnnnnnnnnnnnnnnnnnnnnnnnnnnnnnnnnnnnnnnnnnnnnnnnnnnnnnnnnnnnnnnnnnnnnnnnnnnnnnnnnnnnnnnnnnnnnnnnnnnnnnnnnnnnnnnnnnnnnnnnnnnnnnnnnnnnnnnnnnnnnnnnnnnnnnnnnnnnnnnnnnnnnnnnnnnnnnnnnnnnnnnnnnnnnnnnnnnnnnnnnnnnnnnnnnnnnnnnnnnnnnnnnnnnnnnnnnnnnnnnnnnnnnnnnnnnnnnnnnnnnnnnnnnnnnnnnnnnnnnnnnnnnnnnnnnnnnnnnnnnnnnnnnnnnnnnnnnnnnnnnnnnnnnnnnnnnnnnnnnnnnnnnnnnnnnnnnnnnnnnnnnnnnnnnnnnnnnnnnnnnnnnnnnnnnnnnnnnnnnnnnnnnnnnnnnnnnnnnnnnnnnnnnnnnnnnnnnnnnnnnnnnnnnnnnnnnnnnnnnnnnnnnnnnnnnnnnnnnnnnnnnnnnnnnnnnnnnnnnnnnnnnnnnnnnnnnnnnnnnnnnnnnnnnnnnnnnnnnnnnnnnnnnnnnnnnnnnnnnnnnnnnnnnnnnnnnnnnnnnnnnnnnnnnnnnnnnnnnnnnnnnnnnnnnnnnnnnnnnnnnnnnnnnnnnnnnnnnnnnnnnnnnnnnnnnnnnnnnnnnnnnnnnnnnnnnnnnnnnnnnnnnnnnnnnnnnnnnnnnnnnnnnnnnnnnnnnnnnnnnnnnnnnnnnnnnnnnnnnnnnnnnnnnnnnnnnnnnnnnnnnnnnnnnnnnnnnnnnnnnnnnnnnnnnnnnnnnnnnnnnnnnnnnnnnnnnnnnnnnnnnnnnnnnnnnnnnnnnnnnnnnnnnnnnnnnnnnnnnnnnnnnnnnnnnnnnnnnnnnnnnnnnnnnnnnnnnnnnnnnnnnnnnnnnnnnnnnnnnnnnnnnnnnnnnnnnnnnnnnnnnnnnnnnnnnnnnnnnnnnnnnnnnnnnnnnnnnnnnnnnnnnnnnnnnnnnnnnnnnnnnnnnnnnnnnnnnnnnnnnnnnnnnnnnnnnnnnnnnnnnnnnnnnnnnnnnnnnnnnnnnnnnnnnnnnnnnnnnnnnnnnnnnnnnnnnnnnnnnnnnnnnnnnnnnnnnnnnnnnnnnnnnnnnnnnnnnnnnnnnnnnnnnnnnnnnnnnnnnnnnnnnnnnnnnnnnnnnnnnnnnnnnnnnnnnnnnnnnnnnnnnnnnnnnnnnnnnnnnnnnnnnnnnnnnnnnnnnnnnnnnnnnnnnnnnnnnnnnnnnnnnnnnnnnnnnnnnnnnnnnnnnnnnnnnnnnnnnnnnnnnnnnnnnnnnnnnnnnnnnnnnnnnnnnnnnnnnnnnnnnnnnnnnnnnnnnnnnnnnnnnnnnnnnnnnnnnnnnnnnnnnnnnnnnnnnnnnnnnnnnnnnnnnnnnnnnnnnnnnnnnnnnnnnnnnnnnnnnnnnnnnnnnnnnnnnnnnnnnnnnnnnnnnnnnnnnnnnnnnnnnnnnnnnnnnnnnnnnnnnnnnnnnnnnnnnnnnnnnnnnnnnnnnnnnnnnnnnnnnnnnnnnnnnnnnnnnnnnnnnnnnnnnnnnnnnnnnnnnnnnnnnnnnnnnnnnnnnnnnnnnnnnnnnnnnnnnnnnnnnnnnnnnnnnnnnnnnnnnnnnnnnnnnnnnnnnnnnnnnnnnnnnnnnnnnnnnnnnnnnnnnnnnnnnnnnnnnnnnnnnnnnnnnnnnnnnnnnnnnnnnnnnnnnnnnnnnnnnnnnnnnnnnnnnnnnnnnnnnnnnnnnnnnnnnnnnnnnnnnnnnnnnnnnnnnnnnnnnnnnnnnnnnnnnnnnnnnnnnnnnnnnnnnnnnnnnnnnnnnnnnnnnnnnnnnnnnnnnnnnnnnnnnnnnnnnnnnnnnnnnnnnnnnnnnnnnnnnnnnnnnnnnnnnnnnnnnnnnnnnnnnnnnnnnnnnnnnnnnnnnnnnnnnnnnnnnnnnnnnnnnnnnnnnnnnnnnnnnnnnnnnnnnnnnnnnnnnnnnnnnnnnnnnnnnnnnnnnnnnnnnnnnnnnnnnnnnnnnnnnnnnnnnnnnnnnnnnnnnnnnnnnnnnnnnnnnnnnnnnnnnnnnnnnnnnnnnnnnnnnnnnnnnnnnnnnnnnnnnnnnnnnnnnnnnnnnnnnnnnnnnnnnnnnnnnnnnnnnnnnnnnnnnnnnnnnnnnnnnnnnnnnnnnnnnnnnnnnnnnnnnnnnnnnnnnnnnnnnnnnnnnnnnnnnnnnnnnnnnnnnnnnnnnnnnnnnnnnnnnnnnnnnnnnnnnnnnnnnnnnnnnnnnnnnnnnnnnnnnnnnnnnnnnnnnnnnnnnnnnnnnnnnnnnnnnnnnnnnnnnnnnnnnnnnnnnnnnnnnnnnnnnnnnnnnnnnnnnnnnnnnnnnnnnnnnnnnnnnnnnnnnnnnnnnnnnnnnnnnnnnnnnnnnnnnnnnnnnnnnnnnnnnnnnnnnnnnnnnnnnnnnnnnnnnnnnnnnnnnnnnnnnnnnnnnnnnnnnnnnnnnnnnnnnnnnnnnnnnnnnnnnnnnnnnnnnnnnnnnnnnnnnnnnnnnnnnnnnnnnnnnnnnnnnnnnnnnnnnnnnnnnnnnnnnnnnnnnnnnnnnnnnnnnnnnnnnnnnnnnnnnnnnnnnnnnnnnnnnnnnnnnnnnnnnnnnnnnnnnnnnnnnnnnnnnnnnnnnnnnnnnnnnnnnnnnnnnnnnnnnnnnnnnnnnnnnnnnnnnnnnnnnnnnnnnnnnnnnnnnnnnnnnnnnnnnnnnnnnnnnnnnnnnnnnnnnnnnnnnnnnnnnnnnnnnnnnnnnnnnnnnnnnnnnnnnnnnnnnnnnnnnnnnnnnnnnnnnnnnnnnnnnnnnnnnnnnnnnnnnnnnnnnnnnnnnnnnnnnnnnnnnnnnnnnnnnnnnnnnnnnnnnnnnnnnnnnnnnnnnnnnnnnnnnnnnnnnnnnnnnnnnnnnnnnnnnnnnnnnnnnnnnnnnnnnnnnnnnnnnnnnnnnnnnnnnnnnnnnnnnnnnnnnnnnnnnnnnnnnnnnnnnnnnnnnnnnnnnnnnnnnnnnnnnnnnnnnnnnnnnnnnnnnnnnnnnnnnnnnnnnnnnnnnnnnnnnnnnnnnnnnnnnnnnnnnnnnnnnnnnnnnnnnnnnnnnnnnnnnnnnnnnnnnnnnnnnnnnnnnnnnnnnnnnnnnnnnnnnnnnnnnnnnnnnnnnnnnnnnnnnnnnnnnnnnnnnnnnnnnnnnnnnnnnnnnnnnnnnnnnnnnnnnnnnnnnnnnnnnnnnnnnnnnnnnnnnnnnnnnnnnnnnnnnnnnnnnnnnnnnnnnnnnnnnnnnnnnnnnnnnnnnnnnnnnnnnnnnnnnnnnnnnnnnnnnnnnnnnnnnnnnnnnnnnnnnnnnnnnnnnnnnnnnnnnnnnnnnnnnnnnnnnnnnnnnnnnnnnnnnnnnnnnnnnnnnnnnnnnnnnnnnnnnnnnnnnnnnnnnnnnnnnnnnnnnnnnnnnnnnnnnnnnnnnnnnnnnnnnnnnnnnnnnnnnnnnnnnnnnnnnnnnnnnnnnnnnnnnnnnnnnnnnnnnnnnnnnnnnnnnnnnnnnnnnnnnnnnnnnnnnnnnnnnnnnnnnnnnnnnnnnnnnnnnnnnnnnnnnnnnnnnnnnnnnnnnnnnnnnnnnnnnnnnnnnnnnnnnnnnnnnnnnnnnnnnnnnnnnnnnnnnnnnnnnnnnnnnnnnnnnnnnnnnnnnnnnnnnnnnnnnnnnnnnnnnnnnnnnnnnnnnnnnnnnnnnnnnnnnnnnnnnnnnnnnnnnnnnnnnnnnnnnnnnnnnnnnnnnnnnnnnnnnnnnnnnnnnnnnnnnnnnnnnnnnnnnnnnnnnnnnnnnnnnnnnnnnnnnnnnnnnnnnnnnnnnnnnnnnnnnnnnnnnnnnnnnnnnnnnnnnnnnnnnnnnnnnnnnnnnnnnnnnnnnnnnnnnnnnnnnnnnnnnnnnnnnnnnnnnnnnnnnnnnnnnnnnnnnnnnnnnnnnnnnnnnnnnnnnnnnnnnnnnnnnnnnnnnnnnnnnnnnnnnnnnnnnnnnnnnnnnnnnnnnnnnnnnnnnnnnnnnnnnnnnnnnnnnnnnnnnnnnnnnnnnnnnnnnnnnnnnnnnnnnnnnnnnnnnnnnnnnnnnnnnnnnnnnnnnnnnnnnnnnnnnnnnnnnnnnnnnnnnnnnnnnnnnnnnnnnnnnnnnnnnnnnnnnnnnnnnnnnnnnnnnnnnnnnnnnnnnnnnnnnnnnnnnnnnnnnnnnnnnnnnnnnnnnnnnnnnnnnnnnnnnnnnnnnnnnnnnnnnnnnnnnnnnnnnnnnnnnnnnnnnnnnnnnnnnnnnnnnnnnnnnnnnnnnnnnnnnnnnnnnnnnnnnnnnnnnnnnnnnnnnnnnnnnnnnnnnnnnnnnnnnnnnnnnnnnnnnnnnnnnnnnnnnnnnnnnnnnnnnnnnnnnnnnnnnnnnnnnnnnnnnnnnnnnnnnnnnnnnnnnnnnnnnnnnnnnnnnnnnnnnnnnnnnnnnnnnnnnnnnnnnnnnnnnnnnnnnnnnnnnnnnnnnnnnnnnnnnnnnnnnnnnnnnnnnnnnnnnnnnnnnnnnnnnnnnnnnnnnnnnnnnnnnnnnnnnnnnnnnnnnnnnnnnnnnnnnnnnnnnnnnnnnnnnnnnnnnnnnnnnnnnnnnnnnnnnnnnnnnnnnnnnnnnnnnnnnnnnnnnnnnnnnnnnnnnnnnnnnnnnnnnnnnnnnnnnnnnnnnnnnnnnnnnnnnnnnnnnnnnnnnnnnnnnnnnnnnnnnnnnnnnnnnnnnnnnnnnnnnnnnnnnnnnnnnnnnnnnnnnnnnnnnnnnnnnnnnnnnnnnnnnnnnnnnnnnnnnnnnnnnnnnnnnnnnnnnnnnnnnnnnnnnnnnnnnnnnnnnnnnnnnnnnnnnnnnnnnnnnnnnnnnnnnnnnnnnnnnnnnnnnnnnnnnnnnnnnnnnnnnnnnnnnnnnnnnnnnnnnnnnnnnnnnnnnnnnnnnnnnnnnnnnnnnnnnnnnnnnnnnnnnnnnnnnnnnnnnnnnnnnnnnnnnnnnnnnnnnnnnnnnnnnnnnnnnnnnnnnnnnnnnnnnnnnnnnnnnnnnnnnnnnnnnnnnnnnnnnnnnnnnnnnnnnnnnnnnnnnnnnnnnnnnnnnnnnnnnnnnnnnnnnnnnnnnnnnnnnnnnnnnnnnnnnnnnnnnnnnnnnnnnnnnnnnnnnnnnnnnnnnnnnnnnnnnnnnnnnnnnnnnnnnnnnnnnnnnnnnnnnnnnnnnnnnnnnnnnnnnnnnnnnnnnnnnnnnnnnnnnnnnnnnnnnnnnnnnnnnnnnnnnnnnnnnnnnnnnnnnnnnnnnnnnnnnnnnnnnnnnnnnnnnnnnnnnnnnnnnnnnnnnnnnnnnnnnnnnnnnnnnnnnnnnnnnnnnnnnnnnnnnnnnnnnnnnnnnnnnnnnnnnnnnnnnnnnnnnnnnnnnnnnnnnnnnnnnnnnnnnnnnnnnnnnnnnnnnnnnnnnnnnnnnnnnnnnnnnnnnnnnnnnnnnnnnnnnnnnnnnnnnnnnnnnnnnnnnnnnnnnnnnnnnnnnnnnnnnnnnnnnnnnnnnnnnnnnnnnnnnnnnnnnnnnnnnnnnnnnnnnnnnnnnnnnnnnnnnnnnnnnnnnnnnnnnnnnnnnnnnnnnnnnnnnnnnnnnnnnnnnnnnnnnnnnnnnnnnnnnnnnnnnnnnnnnnnnnnnnnnnnnnnnnnnnnnnnnnnnnnnnnnnnnnnnnnnnnnnnnnnnnnnnnnnnnnnnnnnnnnnnnnnnnnnnnnnnnnnnnnnnnnnnnnnnnnnnnnnnnnnnnnnnnnnnnnnnnnnnnnnnnnnnnnnnnnnnnnnnnnnnnnnnnnnnnnnnnnnnnnnnnnnnnnnnnnnnnnnnnnnnnnnnnnnnnnnnnnnnnnnnnnnnnnnnnnnnnnnnnnnnnnnnnnnnnnnnnnnnnnnnnnnnnnnnnnnnnnnnnnnnnnnnnnnnnnnnnnnnnnnnnnnnnnnnnnnnnnnnnnnnnnnnnnnnnnnnnnnnnnnnnnnnnnnnnnnnnnnnnnnnnnnnnnnnnnnnnnnnnnnnnnnnnnnnnnnnnnnnnnnnnnnnnnnnnnnnnnnnnnnnnnnnnnnnnnnnnnnnnnnnnnnnnnnnnnnnnnnnnnnnnnnnnnnnnnnnnnnnnnnnnnnnnnnnnnnnnnnnnnnnnnnnnnnnnnnnnnnnnnnnnnnnnnnnnnnnnnnnnnnnnnnnnnnnnnnnnnnnnnnnnnnnnnnnnnnnnnnnnnnnnnnnnnnnnnnnnnnnnnnnnnnnnnnnnnnnnnnnnnnnnnnnnnnnnnnnnnnnnnnnnnnnnnnnnnnnnnnnnnnnnnnnnnnnnnnnnnnnnnnnnnnnnnnnnnnnnnnnnnnnnnnnnnnnnnnnnnnnnnnnnnnnnnnnnnnnnnnnnnnnnnnnnnnnnnnnnnnnnnnnnnnnnnnnnnnnnnnnnnnnnnnnnnnnnnnnnnnnnnnnnnnnnnnnnnnnnnnnnnnnnnnnnnnnnnnnnnnnnnnnnnnnnnnnnnnnnnnnnnnnnnnnnnnnnnnnnnnnnnnnnnnnnnnnnnnnnnnnnnnnnnnnnnnnnnnnnnnnnnnnnnnnnnnnnnnnnnnnnnnnnnnnnnnnnnnnnnnnnnnnnnnnnnnnnnnnnnnnnnnnnnnnnnnnnnnnnnnnnnnnnnnnnnnnnnnnnnnnnnnnnnnnnnnnnnnnnnnnnnnnnnnnnnnnnnnnnnnnnnnnnnnnnnnnnnnnnnnnnnnnnnnnnnnnnnnnnnnnnnnnnnnnnnnnnnnnnnnnnnnnnnnnnnnnnnnnnnnnnnnnnnnnnnnnnnnnnnnnnnnnnnnnnnnnnnnnnnnnnnnnnnnnnnnnnnnnnnnnnnnnnnnnnnnnnnnnnnnnnnnnnnnnnnnnnnnnnnnnnnnnnnnnnnnnnnnnnnnnnnnnnnnnnnnnnnnnnnnnnnnnnnnnnnnnnnnnnnnnnnnnnnnnnnnnnnnnnnnnnnnnnnnnnnnnnnnnnnnnnnnnnnnnnnnnnnnnnnnnnnnnnnnnnnnnnnnnnnnnnnnnnnnnnnnnnnnnnnnnnnnnnnnnnnnnnnnnnnnnnnnnnnnnnnnnnnnnnnnnnnnnnnnnnnnnnnnnnnnnnnnnnnnnnnnnnnnnnnnnnnnnnnnnnnnnnnnnnnnnnnnnnnnnnnnnnnnnnnnnnnnnnnnnnnnnnnnnnnnnnnnnnnnnnnnnnnnnnnnnnnnnnnnnnnnnnnnnnnnnnnnnnnnnnnnnnnnnnnnnnnnnnnnnnnnnnnnnnnnnnnnnnnnnnnnnnnnnnnnnnnnnnnnnnnnnnnnnnnnnnnnnnnnnnnnnnnnnnnnnnnnnnnnnnnnnnnnnnnnnnnnnnnnnnnnnnnnnnnnnnnnnnnnnnnnnnnnnnnnnnnnnnnnnnnnnnnnnnnnnnnnnnnnnnnnnnnnnnnnnnnnnnnnnnnnnnnnnnnnnnnnnnnnnnnnnnnnnnnnnnnnnnnnnnnnnnnnnnnnnnnnnnnnnnnnnnnnnnnnnnnnnnnnnnnnnnnnnnnnnnnnnnnnnnnnnnnnnnnnnnnnnnnnnnnnnnnnnnnnnnnnnnnnnnnnnnnnnnnnnnnnnnnnnnnnnnnnnnnnnnnnnnnnnnnnnnnnnnnnnnnnnnnnnnnnnnnnnnnnnnnnnnnnnnnnnnnnnnnnnnnnnnnnnnnnnnnnnnnnnnnnnnnnnnnnnnnnnnnnnnnnnnnnnnnnnnnnnnnnnnnnnnnnnnnnnnnnnnnnnnnnnnnnnnnnnnnnnnnnnnnnnnnnnnnnnnnnnnnnnnnnnnnnnnnnnnnnnnnnnnnnnnnnnnnnnnnnnnnnnnnnnnnnnnnnnnnnnnnnnnnnnnnnnnnnnnnnnnnnnnnnnnnnnnnnnnnnnnnnnnnnnnnnnnnnnnnnnnnnnnnnnnnnnnnnnnnnnnnnnnnnnnnnnnnnnnnnnnnnnnnnnnnnnnnnnnnnnnnnnnnnnnnnnnnnnnnnnnnnnnnnnnnnnnnnnnnnnnnnnnnnnnnnnnnnnnnnnnnnnnnnnnnnnnnnnnnnnnnnnnnnnnnnnnnnnnnnnnnnnnnnnnnnnnnnnnnnnnnnnnnnnnnnnnnnnnnnnnnnnnnnnnnnnnnnnnnnnnnnnnnnnnnnnnnnnnnnnnnnnnnnnnnnnnnnnnnnnnnnnnnnnnnnnnnnnnnnnnnnnnnnnnnnnnnnnnnnnnnnnnnnnnnnnnnnnnnnnnnnnnnnnnnnnnnnnnnnnnnnnnnnnnnnnnnnnnnnnnnnnnnnnnnnnnnnnnnnnnnnnnnnnnnnnnnnnnnnnnnnnnnnnnnnnnnnnnnnnnnnnnnnnnnnnnnnnnnnnnnnnnnnnnnnnnnnnnnnnnnnnnnnnnnnnnnnnnnnnnnnnnnnnnnnnnnnnnnnnnnnnnnnnnnnnnnnnnnnnnnnnnnnnnnnnnnnnnnnnnnnnnnnnnnnnnnnnnnnnnnnnnnnnnnnnnnnnnnnnnnnnnnnnnnnnnnnnnnnnnnnnnnnnnnnnnnnnnnnnnnnnnnnnnnnnnnnnnnnnnnnnnnnnnnnnnnnnnnnnnnnnnnnnnnnnnnnnnnnnnnnnnnnnnnnnnnnnnnnnnnnnnnnnnnnnnnnnnnnnnnnnnnnnnnnnnnnnnnnnnnnnnnnnnnnnnnnnnnnnnnnnnnnnnnnnnnnnnnnnnnnnnnnnnnnnnnnnnnnnnnnnnnnnnnnnnnnnnnnnnnnnnnnnnnnnnnnnnnnnnnnnnnnnnnnnnnnnnnnnnnnnnnnnnnnnnnnnnnnnnnnnnnnnnnnnnnnnnnnnnnnnnnnnnnnnnnnnnnnnnnnnnnnnnnnnnnnnnnnnnnnnnnnnnnnnnnnnnnnnnnnnnnnnnnnnnnnnnnnnnnnnnnnnnnnnnnnnnnnnnnnnnnnnnnnnnnnnnnnnnnnnnnnnnnnnnnnnnnnnnnnnnnnnnnnnnnnnnnnnnnnnnnnnnnnnnnnnnnnnnnnnnnnnnnnnnnnnnnnnnnnnnnnnnnnnnnnnnnnnnnnnnnnnnnnnnnnnnnnnnnnnnnnnnnnnnnnnnnnnnnnnnnnnnnnnnnnnnnnnnnnnnnnnnnnnnnnnnnnnnnnnnnnnnnnnnnnnnnnnnnnnnnnnnnnnnnnnnnnnnnnnnnnnnnnnnnnnnnnnnnnnnnnnnnnnnnnnnnnnnnnnnnnnnnnnnnnnnnnnnnnnnnnnnnnnnnnnnnnnnnnnnnnnnnnnnnnnnnnnnnnnnnnnnnnnnnnnnnnnnnnnnnnnnnnnnnnnnnnnnnnnnnnnnnnnnnnnnnnnnnnnnnnnnnnnnnnnnnnnnnnnnnnnnnnnnnnnnnnnnnnnnnnnnnnnnnnnnnnnnnnnnnnnnnnnnnnnnnnnnnnnnnnnnnnnnnnnnnnnnnnnnnnnnnnnnnnnnnnnnnnnnnnnnnnnnnnnnnnnnnnnnnnnnnnnnnnnnnnnnnnnnnnnnnnnnnnnnnnnnnnnnnnnnnnnnnnnnnnnnnnnnnnnnnnnnnnnnnnnnnnnnnnnnnnnnnnnnnnnnnnnnnnnnnnnnnnnnnnnnnnnnnnnnnnnnnnnnnnnnnnnnnnnnnnnnnnnnnnnnnnnnnnnnnnnnnnnnnnnnnnnnnnnnnnnnnnnnnnnnnnnnnnnnnnnnnnnnnnnnnnnnnnnnnnnnnnnnnnnnnnnnnnnnnnnnnnnnnnnnnnnnnnnnnnnnnnnnnnnnnnnnnnnnnnnnnnnnnnnnnnnnnnnnnnnnnnnnnnnnnnnnnnnnnnnnnnnnnnnnnnnnnnnnnnnnnnnnnnnnnnnnnnnnnnnnnnnnnnnnnnnnnnnnnnnnnnnnnnnnnnnnnnnnnnnnnnnnnnnnnnnnnnnnnnnnnnnnnnnnnnnnnnnnnnnnnnnnnnnnnnnnnnnnnnnnnnnnnnnnnnnnnnnnnnnnnnnnnnnnnnnnnnnnnnnnnnnnnnnnnnnnnnnnnnnnnnnnnnnnnnnnnnnnnnnnnnnnnnnnnnnnnnnnnnnnnnnnnnnnnnnnnnnnnnnnnnnnnnnnnnnnnnnnnnnnnnnnnnnnnnnnnnnnnnnnnnnnnnnnnnnnnnnnnnnnnnnnnnnnnnnnnnnnnnnnnnnnnnnnnnnnnnnnnnnnnnnnnnnnnnnnnnnnnnnnnnnnnnnnnnnnnnnnnnnnnnnnnnnnnnnnnnnnnnnnnnnnnnnnnnnnnnnnnnnnnnnnnnnnnnnnnnnnnnnnnnnnnnnnnnnnnnnnnnnnnnnnnnnnnnnnnnnnnnnnnnnnnnnnnnnnnnnnnnnnnnnnnnnnnnnnnnnnnnnnnnnnnnnnnnnnnnnnnnnnnnnnnnnnnnnnnnnnnnnnnnnnnnnnnnnnnnnnnnnnnnnnnnnnnnnnnnnnnnnnnnnnnnnnnnnnnnnnnnnnnnnnnnnnnnnnnnnnnnnnnnnnnnnnnnnnnnnnnnnnnnnnnnnnnnnnnnnnnnnnnnnnnnnnnnnnnnnnnnnnnnnnnnnnnnnnnnnnnnnnnnnnnnnnnnnnnnnnnnnnnnnnnnnnnnnnnnnnnnnnnnnnnnnnnnnnnnnnnnnnnnnnnnnnnnnnnnnnnnnnnnnnnnnnnnnnnnnnnnnnnnnnnnnnnnnnnnnnnnnnnnnnnnnnnnnnnnnnnnnnnnnnnnnnnnnnnnnnnnnnnnnnnnnnnnnnnnnnnnnnnnnnnnnnnnnnnnnnnnnnnnnnnnnnnnnnnnnnnnnnnnnnnnnnnnnnnnnnnnnnnnnnnnnnnnnnnnnnnnnnnnnnnnnnnnnnnnnnnnnnnnnnnnnnnnnnnnnnnnnnnnnnnnnnnnnnnnnnnnnnnnnnnnnnnnnnnnnnnnnnnnnnnnnnnnnnnnnnnnnnnnnnnnnnnnnnnnnnnnnnnnnnnnnnnnnnnnnnnnnnnnnnnnnnnnnnnnnnnnnnnnnnnnnnnnnnnnnnnnnnnnnnnnnnnnnnnnnnnnnnnnnnnnnnnnnnnnnnnnnnnnnnnnnnnnnnnnnnnnnnnnnnnnnnnnnnnnnnnnnnnnnnnnnnnnnnnnnnnnnnnnnnnnnnnnnnnnnnnnnnnnnnnnnnnnnnnnnnnnnnnnnnnnnnnnnnnnnnnnnnnnnnnnnnnnnnnnnnnnnnnnnnnnnnnnnnnnnnnnnnnnnnnnnnnnnnnnnnnnnnnnnnnnnnnnnnnnnnnnnnnnnnnnnnnnnnnnnnnnnnnnnnnnnnnnnnnnnnnnnnnnnnnnnnnnnnnnnnnnnnnnnnnnnnnnnnnnnnnnnnnnnnnnnnnnnnnnnnnnnnnnnnnnnnnnnnnnnnnnnnnnnnnnnnnnnnnnnnnnnnnnnnnnnnnnnnnnnnnnnnnnnnnnnnnnnnnnnnnnnnnnnnnnnnnnnnnnnnnnnnnnnnnnnnnnnnnnnnnnnnnnnnnnnnnnnnnnnnnnnnnnnnnnnnnnnnnnnnnnnnnnnnnnnnnnnnnnnnnnnnnnnnnnnnnnnnnnnnnnnnnnnnnnnnnnnnnnnnnnnnnnnnnnnnnnnnnnnnnnnnnnnnnnnnnnnnnnnnnnnnnnnnnnnnnnnnnnnnnnnnnnnnnnnnnnnnnnnnnnnnnnnnnnnnnnnnnnnnnnnnnnnnnnnnnnnnnnnnnnnnnnnnnnnnnnnnnnnnnnnnnnnnnnnnnnnnnnnnnnnnnnnnnnnnnnnnnnnnnnnnnnnnnnnnnnnnnnnnnnnnnnnnnnnnnnnnnnnnnnnnnnnnnnnnnnnnnnnnnnnnnnnnnnnnnnnnnnnnnnnnnnnnnnnnnnnnnnnnnnnnnnnnnnnnnnnnnnnnnnnnnnnnnnnnnnnnnnnnnnnnnnnnnnnnnnnnnnnnnnnnnnnnnnnnnnnnnnnnnnnnnnnnnnnnnnnnnnnnnnnnnnnnnnnnnnnnnnnnnnnnnnnnnnnnnnnnnnnnnnnnnnnnnnnnnnnnnnnnnnnnnnnnnnnnnnnnnnnnnnnnnnnnnnnnnnnnnnnnnnnnnnnnnnnnnnnnnnnnnnnnnnnnnnnnnnnnnnnnnnnnnnnnnnnnnnnnnnnnnnnnnnnnnnnnnnnnnnnnnnnnnnnnnnnnnnnnnnnnnnnnnnnnnnnnnnnnnnnnnnnnnnnnnnnnnnnnnnnnnnnnnnnnnnnnnnnnnnnnnnnnnnnnnnnnnnnnnnnnnnnnnnnnnnnnnnnnnnnnnnnnnnnnnnnnnnnnnnnnnnnnnnnnnnnnnnnnnnnnnnnnnnnnnnnnnnnnnnnnnnnnnnnnnnnnnnnnnnnnnnnnnnnnnnnnnnnnnnnnnnnnnnnnnnnnnnnnnnnnnnnnnnnnnnnnnnnnnnnnnnnnnnnnnnnnnnnnnnnnnnnnnnnnnnnnnnnnnnnnnnnnnnnnnnnnnnnnnnnnnnnnnnnnnnnnnnnnnnnnnnnnnnnnnnnnnnnnnnnnnnnnnnnnnnnnnnnnnnnnnnnnnnnnnnnnnnnnnnnnnnnnnnnnnnnnnnnnnnnnnnnnnnnnnnnnnnnnnnnnnnnnnnnnnnnnnnnnnnnnnnnnnnnnnnnnnnnnnnnnnnnnnnnnnnnnnnnnnnnnnnnnnnnnnnnnnnnnnnnnnnnnnnnnnnnnnnnnnnnnnnnnnnnnnnnnnnnnnnnnnnnnnnnnnnnnnnnnnnnnnnnnnnnnnnnnnnnnnnnnnnnnnnnnnnnnnnnnnnnnnnnnnnnnnnnnnnnnnnnnnnnnnnnnnnnnnnnnnnnnnnnnnnnnnnnnnnnnnnnnnnnnnnnnnnnnnnnnnnnnnnnnnnnnnnnnnnnnnnnnnnnnnnnnnnnnnnnnnnnnnnnnnnnnnnnnnnnnnnnnnnnnnnnnnnnnnnnnnnnnnnnnnnnnnnnnnnnnnnnnnnnnnnnnnnnnnnnnnnnnnnnnnnnnnnnnnnnnnnnnnnnnnnnnnnnnnnnnnnnnnnnnnnnnnnnnnnnnnnnnnnnnnnnnnnnnnnnnnnnnnnnnnnnnnnnnnnnnnnnnnnnnnnnnnnnnnnnnnnnnnnnnnnnnnnnnnnnnnnnnnnnnnnnnnnnnnnnnnnnnnnnnnnnnnnnnnnnnnnnnnnnnnnnnnnnnnnnnnnnnnnnnnnnnnnnnnnnnnnnnnnnnnnnnnnnnnnnnnnnnnnnnnnnnnnnnnnnnnnnnnnnnnnnnnnnnnnnnnnnnnnnnnnnnnnnnnnnnnnnnnnnnnnnnnnnnnnnnnnnnnnnnnnnnnnnnnnnnnnnnnnnnnnnnnnnnnnnnnnnnnnnnnnnnnnnnnnnnnnnnnnnnnnnnnnnnnnnnnnnnnnnnnnnnnnnnnnnnnnnnnnnnnnnnnnnnnnnnnnnnnnnnnnnnnnnnnnnnnnnnnnnnnnnnnnnnnnnnnnnnnnnnnnnnnnnnnnnnnnnnnnnnnnnnnnnnnnnnnnnnnnnnnnnnnnnnnnnnnnnnnnnnnnnnnnnnnnnnnnnnnnnnnnnnnnnnnnnnnnnnnnnnnnnnnnnnnnnnnnnnnnnnnnnnnnnnnnnnnnnnnnnnnnnnnnnnnnnnnnnnnnnnnnnnnnnnnnnnnnnnnnnnnnnnnnnnnnnnnnnnnnnnnnnnnnnnnnnnnnnnnnnnnnnnnnnnnnnnnnnnnnnnnnnnnnnnnnnnnnnnnnnnnnnnnnnnnnnnnnnnnnnnnnnnnnnnnnnnnnnnnnnnnnnnnnnnnnnnnnnnnnnnnnnnnnnnnnnnnnnnnnnnnnnnnnnnnnnnnnnnnnnnnnnnnnnnnnnnnnnnnnnnnnnnnnnnnnnnnnnnnnnnnnnnnnnnnnnnnnnnnnnnnnnnnnnnnnnnnnnnnnnnnnnnnnnnnnnnnnnnnnnnnnnnnnnnnnnnnnnnnnnnnnnnnnnnnnnnnnnnnnnnnnnnnnnnnnnnnnnnnnnnnnnnnnnnnnnnnnnnnnnnnnnnnnnnnnnnnnnnnnnnnnnnnnnnnnnnnnnnnnnnnnnnnnnnnnnnnnnnnnnnnnnnnnnnnnnnnnnnnnnnnnnnnnnnnnnnnnnnnnnnnnnnnnnnnnnnnnnnnnnnnnnnnnnnnnnnnnnnnnnnnnnnnnnnnnnnnnnnnnnnnnnnnnnnnnnnnnnnnnnnnnnnnnnnnnnnnnnnnnnnnnnnnnnnnnnnnnnnnnnnnnnnnnnnnnnnnnnnnnnnnnnnnnnnnnnnnnnnnnnnnnnnnnnnnnnnnnnnnnnnnnnnnnnnnnnnnnnnnnnnnnnnnnnnnnnnnnnnnnnnnnnnnnnnnnnnnnnnnnnnnnnnnnnnnnnnnnnnnnnnnnnnnnnnnnnnnnnnnnnnnnnnnnnnnnnnnnnnnnnnnnnnnnnnnnnnnnnnnnnnnnnnnnnnnnnnnnnnnnnnnnnnnnnnnnnnnnnnnnnnnnnnnnnnnnnnnnnnnnnnnnnnnnnnnnnnnnnnnnnnnnnnnnnnnnnnnnnnnnnnnnnnnnnnnnnnnnnnnnnnnnnnnnnnnnnnnnnnnnnnnnnnnnnnnnnnnnnnnnnnnnnnnnnnnnnnnnnnnnnnnnnnnnnnnnnnnnnnnnnnnnnnnnnnnnnnnnnnnnnnnnnnnnnnnnnnnnnnnnnnnnnnnnnnnnnnnnnnnnnnnnnnnnnnnnnnnnnnnnnnnnnnnnnnnnnnnnnnnnnnnnnnnnnnnnnnnnnnnnnnnnnnnnnnnnnnnnnnnnnnnnnnnnnnnnnnnnnnnnnnnnnnnnnnnnnnnnnnnnnnnnnnnnnnnnnnnnnnnnnnnnnnnnnnnnnnnnnnnnnnnnnnnnnnnnnnnnnnnnnnnnnnnnnnnnnnnnnnnnnnnnnnnnnnnnnnnnnnnnnnnnnnnnnnnnnnnnnnnnnnnnnnnnnnnnnnnnnnnnnnnnnnnnnnnnnnnnnnnnnnnnnnnnnnnnnnnnnnnnnnnnnnnnnnnnnnnnnnnnnnnnnnnnnnnnnnnnnnnnnnnnnnnnnnnnnnnnnnnnnnnnnnnnnnnnnnnnnnnnnnnnnnnnnnnnnnnnnnnnnnnnnnnnnnnnnnnnnnnnnnnnnnnnnnnnnnnnnnnnnnnnnnnnnnnnnnnnnnnnnnnnnnnnnnnnnnnnnnnnnnnnnnnnnnnnnnnnnnnnnnnnnnnnnnnnnnnnnnnnnnnnnnnnnnnnnnnnnnnnnnnnnnnnnnnnnnnnnnnnnnnnnnnnnnnnnnnnnnnnnnnnnnnnnnnnnnnnnnnnnnnnnnnnnnnnnnnnnnnnnnnnnnnnnnnnnnnnnnnnnnnnnnnnnnnnnnnnnnnnnnnnnnnnnnnnnnnnnnnnnnnnnnnnnnnnnnnnnnnnnnnnnnnnnnnnnnnnnnnnnnnnnnnnnnnnnnnnnnnnnnnnnnnnnnnnnnnnnnnnnnnnnnnnnnnnnnnnnnnnnnnnnnnnnnnnnnnnnnnnnnnnnnnnnnnnnnnnnnnnnnnnnnnnnnnnnnnnnnnnnnnnnnnnnnnnnnnnnnnnnnnnnnnnnnnnnnnnnnnnnnnnnnnnnnnnnnnnnnnnnnnnnnnnnnnnnnnnnnnnnnnnnnnnnnnnnnnnnnnnnnnnnnnnnnnnnnnnnnnnnnnnnnnnnnnnnnnnnnnnnnnnnnnnnnnnnnnnnnnnnnnnnnnnnnnnnnnnnnnnnnnnnnnnnnnnnnnnnnnnnnnnnnnnnnnnnnnnnnnnnnnnnnnnnnnnnnnnnnnnnnnnnnnnnnnnnnnnnnnnnnnnnnnnnnnnnnnnnnnnnnnnnnnnnnnnnnnnnnnnnnnnnnnnnnnnnnnnnnnnnnnnnnnnnnnnnnnnnnnnnnnnnnnnnnnnnnnnnnnnnnnnnnnnnnnnnnnnnnnnnnnnnnnnnnnnnnnnnnnnnnnnnnnnnnnnnnnnnnnnnnnnnnnnnnnnnnnnnnnnnnnnnnnnnnnnnnnnnnnnnnnnnnnnnnnnnnnnnnnnnnnnnnnnnnnnnnnnnnnnnnnnnnnnnnnnnnnnnnnnnnnnnnnnnnnnnnnnnnnnnnnnnnnnnnnnnnnnnnnnnnnnnnnnnnnnnnnnnnnnnnnnnnnnnnnnnnnnnnnnnnnnnnnnnnnnnnnnnnnnnnnnnnnnnnnnnnnnnnnnnnnnnnnnnnnnnnnnnnnnnnnnnnnnnnnnnnnnnnnnnnnnnnnnnnnnnnnnnnnnnnnnnnnnnnnnnnnnnnnnnnnnnnnnnnnnnnnnnnnnnnnnnnnnnnnnnnnnnnnnnnnnnnnnnnnnnnnnnnnnnnnnnnnnnnnnnnnnnnnnnnnnnnnnnnnnnnnnnnnnnnnnnnnnnnnnnnnnnnnnnnnnnnnnnnnnnnnnnnnnnnnnnnnnnnnnnnnnnnnnnnnnnnnnnnnnnnnnnnnnnnnnnnnnnnnnnnnnnnnnnnnnnnnnnnnnnnnnnnnnnnnnnnnnnnnnnnnnnnnnnnnnnnnnnnnnnnnnnnnnnnnnnnnnnnnnnnnnnnnnnnnnnnnnnnnnnnnnnnnnnnnnnnnnnnnnnnnnnnnnnnnnnnnnnnnnnnnnnnnnnnnnnnnnnnnnnnnnnnnnnnnnnnnnnnnnnnnnnnnnnnnnnnnnnnnnnnnnnnnnnnnnnnnnnnnnnnnnnnnnnnnnnnnnnnnnnnnnnnnnnnnnnnnnnnnnnnnnnnnnnnnnnnnnnnnnnnnnnnnnnnnnnnnnnnnnnnnnnnnnnnnnnnnnnnnnnnnnnnnnnnnnnnnnnnnnnnnnnnnnnnnnnnnnnnnnnnnnnnnnnnnnnnnnnnnnnnnnnnnnnnnnnnnnnnnnnnnnnnnnnnnnnnnnnnnnnnnnnnnnnnnnnnnnnnnnnnnnnnnnnnnnnnnnnnnnnnnnnnnnnnnnnnnnnnnnnnnnnnnnnnnnnnnnnnnnnnnnnnnnnnnnnnnnnnnnnnnnnnnnnnnnnnnnnnnnnnnnnnnnnnnnnnnnnnnnnnnnnnnnnnnnnnnnnnnnnnnnnnnnnnnnnnnnnnnnnnnnnnnnnnnnnnnnnnnnnnnnnnnnnnnnnnnnnnnnnnnnnnnnnnnnnnnnnnnnnnnnnnnnnnnnnnnnnnnnnnnnnnnnnnnnnnnnnnnnnnnnnnnnnnnnnnnnnnnnnnnnnnnnnnnnnnnnnnnnnnnnnnnnnnnnnnnnnnnnnnnnnnnnnnnnnnnnnnnnnnnnnnnnnnnnnnnnnnnnnnnnnnnnnnnnnnnnnnnnnnnnnnnnnnnnnnnnnnnnnnnnnnnnnnnnnnnnnnnnnnnnnnnnnnnnnnnnnnnnnnnnnnnnnnnnnnnnnnnnnnnnnnnnnnnnnnnnnnnnnnnnnnnnnnnnnnnnnnnnnnnnnnnnnnnnnnnnnnnnnnnnnnnnnnnnnnnnnnnnnnnnnnnnnnnnnnnnnnnnnnnnnnnnnnnnnnnnnnnnnnnnnnnnnnnnnnnnnnnnnnnnnnnnnnnnnnnnnnnnnnnnnnnnnnnnnnnnnnnnnnnnnnnnnnnnnnnnnnnnnnnnnnnnnnnnnnnnnnnnnnnnnnnnnnnnnnnnnnnnnnnnnnnnnnnnnnnnnnnnnnnnnnnnnnnnnnnnnnnnnnnnnnnnnnnnnnnnnnnnnnnnnnnnnnnnnnnnnnnnnnnnnnnnnnnnnnnnnnnnnnnnnnnnnnnnnnnnnnnnnnnnnnnnnnnnnnnnnnnnnnnnnnnnnnnnnnnnnnnnnnnnnnnnnnnnnnnnnnnnnnnnnnnnnnnnnnnnnnnnnnnnnnnnnnnnnnnnnnnnnnnnnnnnnnnnnnnnnnnnnnnnnnnnnnnnnnnnnnnnnnnnnnnnnnnnnnnnnnnnnnnnnnnnnnnnnnnnnnnnnnnnnnnnnnnnnnnnnnnnnnnnnnnnnnnnnnnnnnnnnnnnnnnnnnnnnnnnnnnnnnnnnnnnnnnnnnnnnnnnnnnnnnnnnnnnnnnnnnnnnnnnnnnnnnnnnnnnnnnnnnnnnnnnnnnnnnnnnnnnnnnnnnnnnnnnnnnnnnnnnnnnnnnnnnnnnnnnnnnnnnnnnnnnnnnnnnnnnnnnnnnnnnnnnnnnnnnnnnnnnnnnnnnnnnnnnnnnnnnnnnnnnnnnnnnnnnnnnnnnnnnnnnnnnnnnnnnnnnnnnnnnnnnnnnnnnnnnnnnnnnnnnnnnnnnnnnnnnnnnnnnnnnnnnnnnnnnnnnnnnnnnnnnnnnnnnnnnnnnnnnnnnnnnnnnnnnnnnnnnnnnnnnnnnnnnnnnnnnnnnnnnnnnnnnnnnnnnnnnnnnnnnnnnnnnnnnnnnnnnnnnnnnnnnnnnnnnnnnnnnnnnnnnnnnnnnnnnnnnnnnnnnnnnnnnnnnnnnnnnnnnnnnnnnnnnnnnnnnnnnnnnnnnnnnnnnnnnnnnnnnnnnnnnnnnnnnnnnnnnnnnnnnnnnnnnnnnnnnnnnnnnnnnnnnnnnnnnnnnnnnnnnnnnnnnnnnnnnnnnnnnnnnnnnnnnnnnnnnnnnnnnnnnnnnnnnnnnnnnnnnnnnnnnnnnnnnnnnnnnnnnnnnnnnnnnnnnnnnnnnnnnnnnnnnnnnnnnnnnnnnnnnnnnnnnnnnnnnnnnnnnnnnnnnnnnnnnnnnnnnnnnnnnnnnnnnnnnnnnnnnnnnnnnnnnnnnnnnnnnnnnnnnnnnnnnnnnnnnnnnnnnnnnnnnnnnnnnnnnnnnnnnnnnnnnnnnnnnnnnnnnnnnnnnnnnnnnnnnnnnnnnnnnnnnnnnnnnnnnnnnnnnnnnnnnnnnnnnnnnnnnnnnnnnnnnnnnnnnnnnnnnnnnnnnnnnnnnnnnnnnnnnnnnnnnnnnnnnnnnnnnnnnnnnnnnnnnnnnnnnnnnnnnnnnnnnnnnnnnnnnnnnnnnnnnnnnnnnnnnnnnnnnnnnnnnnnnnnnnnnnnnnnnnnnnnnnnnnnnnnnnnnnnnnnnnnnnnnnnnnnnnnnnnnnnnnnnnnnnnnnnnnnnnnnnnnnnnnnnnnnnnnnnnnnnnnnnnnnnnnnnnnnnnnnnnnnnnnnnnnnnnnnnnnnnnnnnnnnnnnnnnnnnnnnnnnnnnnnnnnnnnnnnnnnnnnnnnnnnnnnnnnnnnnnnnnnnnnnnnnnnnnnnnnnnnnnnnnnnnnnnnnnnnnnnnnnnnnnnnnnnnnnnnnnnnnnnnnnnnnnnnnnnnnnnnnnnnnnnnnnnnnnnnnnnnnnnnnnnnnnnnnnnnnnnnnnnnnnnnnnnnnnnnnnnnnnnnnnnnnnnnnnnnnnnnnnnnnnnnnnnnnnnnnnnnnnnnnnnnnnnnnnnnnnnnnnnnnnnnnnnnnnnnnnnnnnnnnnnnnnnnnnnnnnnnnnnnnnnnnnnnnnnnnnnnnnnnnnnnnnnnnnnnnnnnnnnnnnnnnnnnnnnnnnnnnnnnnnnnnnnnnnnnnnnnnnnnnnnnnnnnnnnnnnnnnnnnnnnnnnnnnnnnnnnnnnnnnnnnnnnnnnnnnnnnnnnnnnnnnnnnnnnnnnnnnnnnnnnnnnnnnnnnnnnnnnnnnnnnnnnnnnnnnnnnnnnnnnnnnnnnnnnnnnnnnnnnnnnnnnnnnnnnnnnnnnnnnnnnnnnnnnnnnnnnnnnnnnnnnnnnnnnnnnnnnnnnnnnnnnnnnnnnnnnnnnnnnnnnnnnnnnnnnnnnnnnnnnnnnnnnnnnnnnnnnnnnnnnnnnnnnnnnnnnnnnnnnnnnnnnnnnnnnnnnnnnnnnnnnnnnnnnnnnnnnnnnnnnnnnnnnnnnnnnnnnnnnnnnnnnnnnnnnnnnnnnnnnnnnnnnnnnnnnnnnnnnnnnnnnnnnnnnnnnnnnnnnnnnnnnnnnnnnnnnnnnnnnnnnnnnnnnnnnnnnnnnnnnnnnnnnnnnnnnnnnnnnnnnnnnnnnnnnnnnnnnnnnnnnnnnnnnnnnnnnnnnnnnnnnnnnnnnnnnnnnnnnnnnnnnnnnnnnnnnnnnnnnnnnnnnnnnnnnnnnnnnnnnnnnnnnnnnnnnnnnnnnnnnnnnnnnnnnnnnnnnnnnnnnnnnnnnnnnnnnnnnnnnnnnnnnnnnnnnnnnnnnnnnnnnnnnnnnnnnnnnnnnnnnnnnnnnnnnnnnnnnnnnnnnnnnnnnnnnnnnnnnnnnnnnnnnnnnnnnnnnnnnnnnnnnnnnnnnnnnnnnnnnnnnnnnnnnnnnnnnnnnnnnnnnnnnnnnnnnnnnnnnnnnnnnnnnnnnnnnnnnnnnnnnnnnnnnnnnnnnnnnnnnnnnnnnnnnnnnnnnnnnnnnnnnnnnnnnnnnnnnnnnnnnnnnnnnnnnnnnnnnnnnnnnnnnnnnnnnnnnnnnnnnnnnnnnnnnnnnnnnnnnnnnnnnnnnnnnnnnnnnnnnnnnnnnnnnnnnnnnnnnnnnnnnnnnnnnnnnnnnnnnnnnnnnnnnnnnnnnnnnnnnnnnnnnnnnnnnnnnnnnnnnnnnnnnnnnnnnnnnnnnnnnnnnnnnnnnnnnnnnnnnnnnnnnnnnnnnnnnnnnnnnnnnnnnnnnnnnnnnnnnnnnnnnnnnnnnnnnnnnnnnnnnnnnnnnnnnnnnnnnnnnnnnnnnnnnnnnnnnnnnnnnnnnnnnnnnnnnnnnnnnnnnnnnnnnnnnnnnnnnnnnnnnnnnnnnnnnnnnnnnnnnnnnnnnnnnnnnnnnnnnnnnnnnnnnnnnnnnnnnnnnnnnnnnnnnnnnnnnnnnnnnnnnnnnnnnnnnnnnnnnnnnnnnnnnnnnnnnnnnnnnnnnnnnnnnnnnnnnnnnnnnnnnnnnnnnnnnnnnnnnnnnnnnnnnnnnnnnnnnnnnnnnnnnnnnnnnnnnnnnnnnnnnnnnnnnnnnnnnnnnnnnnnnnnnnnnnnnnnnnnnnnnnnnnnnnnnnnnnnnnnnnnnnnnnnnnnnnnnnnnnnnnnnnnnnnnnnnnnnnnnnnnnnnnnnnnnnnnnnnnnnnnnnnnnnnnnnnnnnnnnnnnnnnnnnnnnnnnnnnnnnnnnnnnnnnnnnnnnnnnnnnnnnnnnnnnnnnnnnnnnnnnnnnnnnnnnnnnnnnnnnnnnnnnnnnnnnnnnnnnnnnnnnnnnnnnnnnnnnnnnnnnnnnnnnnnnnnnnnnnnnnnnnnnnnnnnnnnnnnnnnnnnnnnnnnnnnnnnnnnnnnnnnnnnnnnnnnnnnnnnnnnnnnnnnnnnnnnnnnnnnnnnnnnnnnnnnnnnnnnnnnnnnnnnnnnnnnnnnnnnnnnnnnnnnnnnnnnnnnnnnnnnnnnnnnnnnnnnnnnnnnnnnnnnnnnnnnnnnnnnnnnnnnnnnnnnnnnnnnnnnnnnnnnnnnnnnnnnnnnnnnnnnnnnnnnnnnnnnnnnnnnnnnnnnnnnnnnnnnnnnnnnnnnnnnnnnnnnnnnnnnnnnnnnnnnnnnnnnnnnnnnnnnnnnnnnnnnnnnnnnnnnnnnnnnnnnnnnnnnnnnnnnnnnnnnnnnnnnnnnnnnnnnnnnnnnnnnnnnnnnnnnnnnnnnnnnnnnnnnnnnnnnnnnnnnnnnnnnnnnnnnnnnnnnnnnnnnnnnnnnnnnnnnnnnnnnnnnnnnnnnnnnnnnnnnnnnnnnnnnnnnnnnnnnnnnnnnnnnnnnnnnnnnnnnnnnnnnnnnnnnnnnnnnnnnnnnnnnnnnnnnnnnnnnnnnnnnnnnnnnnnnnnnnnnnnnnnnnnnnnnnnnnnnnnnnnnnnnnnnnnnnnnnnnnnnnnnnnnnnnnnnnnnnnnnnnnnnnnnnnnnnnnnnnnnnnnnnnnnnnnnnnnnnnnnnnnnnnnnnnnnnnnnnnnnnnnnnnnnnnnnnnnnnnnnnnnnnnnnnnnnnnnnnnnnnnnnnnnnnnnnnnnnnnnnnnnnnnnnnnnnnnnnnnnnnnnnnnnnnnnnnnnnnnnnnnnnnnnnnnnnnnnnnnnnnnnnnnnnnnnnnnnnnnnnnnnnnnnnnnnnnnnnnnnnnnnnnnnnnnnnnnnnnnnnnnnnnnnnnnnnnnnnnnnnnnnnnnnnnnnnnnnnnnnnnnnnnnnnnnnnnnnnnnnnnnnnnnnnnnnnnnnnnnnnnnnnnnnnnnnnnnnnnnnnnnnnnnnnnnnnnnnnnnnnnnnnnnnnnnnnnnnnnnnnnnnnnnnnnnnnnnnnnnnnnnnnnnnnnnnnnnnnnnnnnnnnnnnnnnnnnnnnnnnnnnnnnnnnnnnnnnnnnnnnnnnnnnnnnnnnnnnnnnnnnnnnnnnnnnnnnnnnnnnnnnnnnnnnnnnnnnnnnnnnnnnnnnnnnnnnnnnnnnnnnnnnnnnnnnnnnnnnnnnnnnnnnnnnnnnnnnnnnnnnnnnnnnnnnnnnnnnnnnnnnnnnnnnnnnnnnnnnnnnnnnnnnnnnnnnnnnnnnnnnnnnnnnnnnnnnnnnnnnnnnnnnnnnnnnnnnnnnnnnnnnnnnnnnnnnnnnnnnnnnnnnnnnnnnnnnnnnnnnnnnnnnnnnnnnnnnnnnnnnnnnnnnnnnnnnnnnnnnnnnnnnnnnnnnnnnnnnnnnnnnnnnnnnnnnnnnnnnnnnnnnnnnnnnnnnnnnnnnnnnnnnnnnnnnnnnnnnnnnnnnnnnnnnnnnnnnnnnnnnnnnnnnnnnnnnnnnnnnnnnnnnnnnnnnnnnnnnnnnnnnnnnnnnnnnnnnnnnnnnnnnnnnnnnnnnnnnnnnnnnnnnnnnnnnnnnnnnnnnnnnnnnnnnnnnnnnnnnnnnnnnnnnnnnnnnnnnnnnnnnnnnnnnnnnnnnnnnnnnnnnnnnnnnnnnnnnnnnnnnnnnnnnnnnnnnnnnnnnnnnnnnnnnnnnnnnnnnnnnnnnnnnnnnnnnnnnnnnnnnnnnnnnnnnnnnnnnnnnnnnnnnnnnnnnnnnnnnnnnnnnnnnnnnnnnnnnnnnnnnnnnnnnnnnnnnnnnnnnnnnnnnnnnnnnnnnnnnnnnnnnnnnnnnnnnnnnnnnnnnnnnnnnnnnnnnnnnnnnnnnnnnnnnnnnnnnnnnnnnnnnnnnnnnnnnnnnnnnnnnnnnnnnnnnnnnnnnnnnnnnnnnnnnnnnnnnnnnnnnnnnnnnnnnnnnnnnnnnnnnnnnnnnnnnnnnnnnnnnnnnnnnnnnnnnnnnnnnnnnnnnnnnnnnnnnnnnnnnnnnnnnnnnnnnnnnnnnnnnnnnnnnnnnnnnnnnnnnnnnnnnnnnnnnnnnnnnnnnnnnnnnnnnnnnnnnnnnnnnnnnnnnnnnnnnnnnnnnnnnnnnnnnnnnnnnnnnnnnnnnnnnnnnnnnnnnnnnnnnnnnnnnnnnnnnnnnnnnnnnnnnnnnnnnnnnnnnnnnnnnnnnnnnnnnnnnnnnnnnnnnnnnnnnnnnnnnnnnnnnnnnnnnnnnnnnnnnnnnnnnnnnnnnnnnnnnnnnnnnnnnnnnnnnnnnnnnnnnnnnnnnnnnnnnnnnnnnnnnnnnnnnnnnnnnnnnnnnnnnnnnnnnnnnnnnnnnnnnnnnnnnnnnnnnnnnnnnnnnnnnnnnnnnnnnnnnnnnnnnnnnnnnnnnnnnnnnnnnnnnnnnnnnnnnnnnnnnnnnnnnnnnnnnnnnnnnnnnnnnnnnnnnnnnnnnnnnnnnnnnnnnnnnnnnnnnnnnnnnnnnnnnnnnnnnnnnnnnnnnnnnnnnnnnnnnnnnnnnnnnnnnnnnnnnnnnnnnnnnnnnnnnnnnnnnnnnnnnnnnnnnnnnnnnnnnnnnnnnnnnnnnnnnnnnnnnnnnnnnnnnnnnnnnnnnnnnnnnnnnnnnnnnnnnnnnnnnnnnnnnnnnnnnnnnnnnnnnnnnnnnnnnnnnnnnnnnnnnnnnnnnnnnnnnnnnnnnnnnnnnnnnnnnnnnnnnnnnnnnnnnnnnnnnnnnnnnnnnnnnnnnnnnnnnnnnnnnnnnnnnnnnnnnnnnnnnnnnnnnnnnnnnnnnnnnnnnnnnnnnnnnnnnnnnnnnnnnnnnnnnnnnnnnnnnnnnnnnnnnnnnnnnnnnnnnnnnnnnnnnnnnnnnnnnnnnnnnnnnnnnnnnnnnnnnnnnnnnnnnnnnnnnnnnnnnnnnnnnnnnnnnnnnnnnnnnnnnnnnnnnnnnnnnnnnnnnnnnnnnnnnnnnnnnnnnnnnnnnnnnnnnnnnnnnnnnnnnnnnnnnnnnnnnnnnnnnnnnnnnnnnnnnnnnnnnnnnnnnnnnnnnnnnnnnnnnnnnnnnnnnnnnnnnnnnnnnnnnnnnnnnnnnnnnnnnnnnnnnnnnnnnnnnnnnnnnnnnnnnnnnnnnnnnnnnnnnnnnnnnnnnnnnnnnnnnnnnnnnnnnnnnnnnnnnnnnnnnnnnnnnnnnnnnnnnnnnnnnnnnnnnnnnnnnnnnnnnnnnnnnnnnnnnnnnnnnnnnnnnnnnnnnnnnnnnnnnnnnnnnnnnnnnnnnnnnnnnnnnnnnnnnnnnnnnnnnnnnnnnnnnnnnnnnnnnnnnnnnnnnnnnnnnnnnnnnnnnnnnnnnnnnnnnnnnnnnnnnnnnnnnnnnnnnnnnnnnnnnnnnnnnnnnnnnnnnnnnnnnnnnnnnnnnnnnnnnnnnnnnnnnnnnnnnnnnnnnnnnnnnnnnnnnnnnnnnnnnnnnnnnnnnnnnnnnnnnnnnnnnnnnnnnnnnnnnnnnnnnnnnnnnnnnnnnnnnnnnnnnnnnnnnnnnnnnnnnnnnnnnnnnnnnnnnnnnnnnnnnnnnnnnnnnnnnnnnnnnnnnnnnnnnnnnnnnnnnnnnnnnnnnnnnnnnnnnnnnnnnnnnnnnnnnnnnnnnnnnnnnnnnnnnnnnnnnnnnnnnnnnnnnnnnnnnnnnnnnnnnnnnnnnnnnnnnnnnnnnnnnnnnnnnnnnnnnnnnnnnnnnnnnnnnnnnnnnnnnnnnnnnnnnnnnnnnnnnnnnnnnnnnnnnnnnnnnnnnnnnnnnnnnnnnnnnnnnnnnnnnnnnnnnnnnnnnnnnnnnnnnnnnnnnnnnnnnnnnnnnnnnnnnnnnnnnnnnnnnnnnnnnnnnnnnnnnnnnnnnnnnnnnnnnnnnnnnnnnnnnnnnnnnnnnnnnnnnnnnnnnnnnnnnnnnnnnnnnnnnnnnnnnnnnnnnnnnnnnnnnnnnnnnnnnnnnnnnnnnnnnnnnnnnnnnnnnnnnnnnnnnnnnnnnnnnnnnnnnnnnnnnnnnnnnnnnnnnnnnnnnnnnnnnnnnnnnnnnnnnnnnnnnnnnnnnnnnnnnnnnnnnnnnnnnnnnnnnnnnnnnnnnnnnnnnnnnnnnnnnnnnnnnnnnnnnnnnnnnnnnnnnnnnnnnnnnnnnnnnnnnnnnnnnnnnnnnnnnnnnnnnnnnnnnnnnnnnnnnnnnnnnnnnnnnnnnnnnnnnnnnnnnnnnnnnnnnnnnnnnnnnnnnnnnnnnnnnnnnnnnnnnnnnnnnnnnnnnnnnnnnnnnnnnnnnnnnnnnnnnnnnnnnnnnnnnnnnnnnnnnnnnnnnnnnnnnnnnnnnnnnnnnnnnnnnnnnnnnnnnnnnnnnnnnnnnnnnnnnnnnnnnnnnnnnnnnnnnnnnnnnnnnnnnnnnnnnnnnnnnnnnnnnnnnnnnnnnnnnnnnnnnnnnnnnnnnnnnnnnnnnnnnnnnnnnnnnnnnnnnnnnnnnnnnnnnnnnnnnnnnnnnnnnnnnnnnnnnnnnnnnnnnnnnnnnnnnnnnnnnnnnnnnnnnnnnnnnnnnnnnnnnnnnnnnnnnnnnnnnnnnnnnnnnnnnnnnnnnnnnnnnnnnnnnnnnnnnnnnnnnnnnnnnnnnnnnnnnnnnnnnnnnnnnnnnnnnnnnnnnnnnnnnnnnnnnnnnnnnnnnnnnnnnnnnnnnnnnnnnnnnnnnnnnnnnnnnnnnnnnnnnnnnnnnnnnnnnnnnnnnnnnnnnnnnnnnnnnnnnnnnnnnnnnnnnnnnnnnnnnnnnnnnnnnnnnnnnnnnnnnnnnnnnnnnnnnnnnnnnnnnnnnnnnnnnnnnnnnnnnnnnnnnnnnnnnnnnnnnnnnnnnnnnnnnnnnnnnnnnnnnnnnnnnnnnnnnnnnnnnnnnnnnnnnnnnnnnnnnnnnnnnnnnnnnnnnnnnnnnnnnnnnnnnnnnnnnnnnnnnnnnnnnnnnnnnnnnnnnnnnnnnnnnnnnnnnnnnnnnnnnnnnnnnnnnnnnnnnnnnnnnnnnnnnnnnnnnnnnnnnnnnnnnnnnnnnnnnnnnnnnnnnnnnnnnnnnnnnnnnnnnnnnnnnnnnnnnnnnnnnnnnnnnnnnnnnnnnnnnnnnnnnnnnnnnnnnnnnnnnnnnnnnnnnnnnnnnnnnnnnnnnnnnnnnnnnnnnnnnnnnnnnnnnnnnnnnnnnnnnnnnnnnnnnnnnnnnnnnnnnnnnnnnnnnnnnnnnnnnnnnnnnnnnnnnnnnnnnnnnnnnnnnnnnnnnnnnnnnnnnnnnnnnnnnnnnnnnnnnnnnnnnnnnnnnnnnnnnnnnnnnnnnnnnnnnnnnnnnnnnnnnnnnnnnnnnnnnnnnnnnnnnnnnnnnnnnnnnnnnnnnnnnnnnnnnnnnnnnnnnnnnnnnnnnnnnnnnnnnnnnnnnnnnnnnnnnnnnnnnnnnnnnnnnnnnnnnnnnnnnnnnnnnnnnnnnnnnnnnnnnnnnnnnnnnnnnnnnnnnnnnnnnnnnnnnnnnnnnnnnnnnnnnnnnnnnnnnnnnnnnnnnnnnnnnnnnnnnnnnnnnnnnnnnnnnnnnnnnnnnnnnnnnnnnnnnnnnnnnnnnnnnnnnnnnnnnnnnnnnnnnnnnnnnnnnnnnnnnnnnnnnnnnnnnnnnnnnnnnnnnnnnnnnnnnnnnnnnnnnnnnnnnnnnnnnnnnnnnnnnnnnnnnnnnnnnnnnnnnnnnnnnnnnnnnnnnnnnnnnnnnnnnnnnnnnnnnnnnnnnnnnnnnnnnnnnnnnnnnnnnnnnnnnnnnnnnnnnnnnnnnnnnnnnnnnnnnnnnnnnnnnnnnnnnnnnnnnnnnnnnnnnnnnnnnnnnnnnnnnnnnnnnnnnnnnnnnnnnnnnnnnnnnnnnnnnnnnnnnnnnnnnnnnnnnnnnnnnnnnnnnnnnnnnnnnnnnnnnnnnnnnnnnnnnnnnnnnnnnnnnnnnnnnnnnnnnnnnnnnnnnnnnnnnnnnnnnnnnnnnnnnnnnnnnnnnnnnnnnnnnnnnnnnnnnnnnnnnnnnnnnnnnnnnnnnnnnnnnnnnnnnnnnnnnnnnnnnnnnnnnnnnnnnnnnnnnnnnnnnnnnnnnnnnnnnnnnnnnnnnnnnnnnnnnnnnnnnnnnnnnnnnnnnnnnnnnnnnnnnnnnnnnnnnnnnnnnnnnnnnnnnnnnnnnnnnnnnnnnnnnnnnnnnnnnnnnnnnnnnnnnnnnnnnnnnnnnnnnnnnnnnnnnnnnnnnnnnnnnnnnnnnnnnnnnnnnnnnnnnnnnnnnnnnnnnnnnnnnnnnnnnnnnnnnnnnnnnnnnnnnnnnnnnnnnnnnnnnnnnnnnnnnnnnnnnnnnnnnnnnnnnnnnnnnnnnnnnnnnnnnnnnnnnnnnnnnnnnnnnnnnnnnnnnnnnnnnnnnnnnnnnnnnnnnnnnnnnnnnnnnnnnnnnnnnnnnnnnnnnnnnnnnnnnnnnnnnnnnnnnnnnnnnnnnnnnnnnnnnnnnnnnnnnnnnnnnnnnnnnnnnnnnnnnnnnnnnnnnnnnnnnnnnnnnnnnnnnnnnnnnnnnnnnnnnnnnnnnnnnnnnnnnnnnnnnnnnnnnnnnnnnnnnnnnnnnnnnnnnnnnnnnnnnnnnnnnnnnnnnnnnnnnnnnnnnnnnnnnnnnnnnnnnnnnnnnnnnnnnnnnnnnnnnnnnnnnnnnnnnnnnnnnnnnnnnnnnnnnnnnnnnnnnnnnnnnnnnnnnnnnnnnnnnnnnnnnnnnnnnnnnnnnnnnnnnnnnnnnnnnnnnnnnnnnnnnnnnnnnnnnnnnnnnnnnnnnnnnnnnnnnnnnnnnnnnnnnnnnnnnnnnnnnnnnnnnnnnnnnnnnnnnnnnnnnnnnnnnnnnnnnnnnnnnnnnnnnnnnnnnnnnnnnnnnnnnnnnnnnnnnnnnnnnnnnnnnnnnnnnnnnnnnnnnnnnnnnnnnnnnnnnnnnnnnnnnnnnnnnnnnnnnnnnnnnnnnnnnnnnnnnnnnnnnnnnnnnnnnnnnnnnnnnnnnnnnnnnnnnnnnnnnnnnnnnnnnnnnnnnnnnnnnnnnnnnnnnnnnnnnnnnnnnnnnnnnnnnnnnnnnnnnnnnnnnnnnnnnnnnnnnnnnnnnnnnnnnnnnnnnnnnnnnnnnnnnnnnnnnnnnnnnnnnnnnnnnnnnnnnnnnnnnnnnnnnnnnnnnnnnnnnnnnnnnnnnnnnnnnnnnnnnnnnnnnnnnnnnnnnnnnnnnnnnnnnnnnnnnnnnnnnnnnnnnnnnnnnnnnnnnnnnnnnnnnnnnnnnnnnnnnnnnnnnnnnnnnnnnnnnnnnnnnnnnnnnnnnnnnnnnnnnnnnnnnnnnnnnnnnnnnnnnnnnnnnnnnnnnnnnnnnnnnnnnnnnnnnnnnnnnnnnnnnnnnnnnnnnnnnnnnnnnnnnnnnnnnnnnnnnnnnnnnnnnnnnnnnnnnnnnnnnnnnnnnnnnnnnnnnnnnnnnnnnnnnnnnnnnnnnnnnnnnnnnnnnnnnnnnnnnnnnnnnnnnnnnnnnnnnnnnnnnnnnnnnnnnnnnnnnnnnnnnnnnnnnnnnnnnnnnnnnnnnnnnnnnnnnnnnnnnnnnnnnnnnnnnnnnnnnnnnnnnnnnnnnnnnnnnnnnnnnnnnnnnnnnnnnnnnnnnnnnnnnnnnnnnnnnnnnnnnnnnnnnnnnnnnnnnnnnnnnnnnnnnnnnnnnnnnnnnnnnnnnnnnnnnnnnnnnnnnnnnnnnnnnnnnnnnnnnnnnnnnnnnnnnnnnnnnnnnnnnnnnnnnnnnnnnnnnnnnnnnnnnnnnnnnnnnnnnnnnnnnnnnnnnnnnnnnnnnnnnnnnnnnnnnnnnnnnnnnnnnnnnnnnnnnnnnnnnnnnnnnnnnnnnnnnnnnnnnnnnnnnnnnnnnnnnnnnnnnnnnnnnnnnnnnnnnnnnnnnnnnnnnnnnnnnnnnnnnnnnnnnnnnnnnnnnnnnnnnnnnnnnnnnnnnnnnnnnnnnnnnnnnnnnnnnnnnnnnnnnnnnnnnnnnnnnnnnnnnnnnnnnnnnnnnnnnnnnnnnnnnnnnnnnnnnnnnnnnnnnnnnnnnnnnnnnnnnnnnnnnnnnnnnnnnnnnnnnnnnnnnnnnnnnnnnnnnnnnnnnnnnnnnnnnnnnnnnnnnnnnnnnnnnnnnnnnnnnnnnnnnnnnnnnnnnnnnnnnnnnnnnnnnnnnnnnnnnnnnnnnnnnnnnnnnnnnnnnnnnnnnnnnnnnnnnnnnnnnnnnnnnnnnnnnnnnnnnnnnnnnnnnnnnnnnnnnnnnnnnnnnnnnnnnnnnnnnnnnnnnnnnnnnnnnnnnnnnnnnnnnnnnnnnnnnnnnnnnnnnnnnnnnnnnnnnnnnnnnnnnnnnnnnnnnnnnnnnnnnnnnnnnnnnnnnnnnnnnnnnnnnnnnnnnnnnnnnnnnnnnnnnnnnnnnnnnnnnnnnnnnnnnnnnnnnnnnnnnnnnnnnnnnnnnnnnnnnnnnnnnnnnnnnnnnnnnnnnnnnnnnnnnnnnnnnnnnnnnnnnnnnnnnnnnnnnnnnnnnnnnnnnnnnnnnnnnnnnnnnnnnnnnnnnnnnnnnnnnnnnnnnnnnnnnnnnnnnnnnnnnnnnnnnnnnnnnnnnnnnnnnnnnnnnnnnnnnnnnnnnnnnnnnnnnnnnnnnnnnnnnnnnnnnnnnnnnnnnnnnnnnnnnnnnnnnnnnnnnnnnnnnnnnnnnnnnnnnnnnnnnnnnnnnnnnnnnnnnnnnnnnnnnnnnnnnnnnnnnnnnnnnnnnnnnnnnnnnnnnnnnnnnnnnnnnnnnnnnnnnnnnnnnnnnnnnnnnnnnnnnnnnnnnnnnnnnnnnnnnnnnnnnnnnnnnnnnnnnnnnnnnnnnnnnnnnnnnnnnnnnnnnnnnnnnnnnnnnnnnnnnnnnnnnnnnnnnnnnnnnnnnnnnnnnnnnnnnnnnnnnnnnnnnnnnnnnnnnnnnnnnnnnnnnnnnnnnnnnnnnnnnnnnnnnnnnnnnnnnnnnnnnnnnnnnnnnnnnnnnnnnnnnnnnnnnnnnnnnnnnnnnnnnnnnnnnnnnnnnnnnnnnnnnnnnnnnnnnnnnnnnnnnnnnnnnnnnnnnnnnnnnnnnnnnnnnnnnnnnnnnnnnnnnnnnnnnnnnnnnnnnnnnnnnnnnnnnnnnnnnnnnnnnnnnnnnnnnnnnnnnnnnnnnnnnnnnnnnnnnnnnnnnnnnnnnnnnnnnnnnnnnnnnnnnnnnnnnnnnnnnnnnnnnnnnnnnnnnnnnnnnnnnnnnnnnnnnnnnnnnnnnnnnnnnnnnnnnnnnnnnnnnnnnnnnnnnnnnnnnnnnnnnnnnnnnnnnnnnnnnnnnnnnnnnnnnnnnnnnnnnnnnnnnnnnnnnnnnnnnnnnnnnnnnnnnnnnnnnnnnnnnnnnnnnnnnnnnnnnnnnnnnnnnnnnnnnnnnnnnnnnnnnnnnnnnnnnnnnnnnnnnnnnnnnnnnnnnnnnnnnnnnnnnnnnnnnnnnnnnnnnnnnnnnnnnnnnnnnnnnnnnnnnnnnnnnnnnnnnnnnnnnnnnnnnnnnnnnnnnnnnnnnnnnnnnnnnnnnnnnnnnnnnnnnnnnnnnnnnnnnnnnnnnnnnnnnnnnnnnnnnnnnnnnnnnnnnnnnnnnnnnnnnnnnnnnnnnnnnnnnnnnnnnnnnnnnnnnnnnnnnnnnnnnnnnnnnnnnnnnnnnnnnnnnnnnnnnnnnnnnnnnnnnnnnnnnnnnnnnnnnnnnnnnnnnnnnnnnnnnnnnnnnnnnnnnnnnnnnnnnnnnnnnnnnnnnnnnnnnnnnnnnnnnnnnnnnnnnnnnnnnnnnnnnnnnnnnnnnnnnnnnnnnnnnnnnnnnnnnnnnnnnnnnnnnnnnnnnnnnnnnnnnnnnnnnnnnnnnnnnnnnnnnnnnnnnnnnnnnnnnnnnnnnnnnnnnnnnnnnnnnnnnnnnnnnnnnnnnnnnnnnnnnnnnnnnnnnnnnnnnnnnnnnnnnnnnnnnnnnnnnnnnnnnnnnnnnnnnnnnnnnnnnnnnnnnnnnnnnnnnnnnnnnnnnnnnnnnnnnnnnnnnnnnnnnnnnnnnnnnnnnnnnnnnnnnnnnnnnnnnnnnnnnnnnnnnnnnnnnnnnnnnnnnnnnnnnnnnnnnnnnnnnnnnnnnnnnnnnnnnnnnnnnnnnnnnnnnnnnnnnnnnnnnnnnnnnnnnnnnnnnnnnnnnnnnnnnnnnnnnnnnnnnnnnnnnnnnnnnnnnnnnnnnnnnnnnnnnnnnnnnnnnnnnnnnnnnnnnnnnnnnnnnnnnnnnnnnnnnnnnnnnnnnnnnnnnnnnnnnnnnnnnnnnnnnnnnnnnnnnnnnnnnnnnnnnnnnnnnnnnnnnnnnnnnnnnnnnnnnnnnnnnnnnnnnnnnnnnnnnnnnnnnnnnnnnnnnnnnnnnnnnnnnnnnnnnnnnnnnnnnnnnnnnnnnnnnnnnnnnnnnnnnnnnnnnnnnnnnnnnnnnnnnnnnnnnnnnnnnnnnnnnnnnnnnnnnnnnnnnnnnnnnnnnnnnnnnnnnnnnnnnnnnnnnnnnnnnnnnnnnnnnnnnnnnnnnnnnnnnnnnnnnnnnnnnnnnnnnnnnnnnnnnnnnnnnnnnnnnnnnnnnnnnnnnnnnnnnnnnnnnnnnnnnnnnnnnnnnnnnnnnnnnnnnnnnnnnnnnnnnnnnnnnnnnnnnnnnnnnnnnnnnnnnnnnnnnnnnnnnnnnnnnnnnnnnnnnnnnnnnnnnnnnnnnnnnnnnnnnnnnnnnnnnnnnnnnnnnnnnnnnnnnnnnnnnnnnnnnnnnnnnnnnnnnnnnnnnnnnnnnnnnnnnnnnnnnnnnnnnnnnnnnnnnnnnnnnnnnnnnnnnnnnnnnnnnnnnnnnnnnnnnnnnnnnnnnnnnnnnnnnnnnnnnnnnnnnnnnnnnnnnnnnnnnnnnnnnnnnnnnnnnnnnnnnnnnnnnnnnnnnnnnnnnnnnnnnnnnnnnnnnnnnnnnnnnnnnnnnnnnnnnnnnnnnnnnnnnnnnnnnnnnnnnnnnnnnnnnnnnnnnnnnnnnnnnnnnnnnnnnnnnnnnnnnnnnnnnnnnnnnnnnnnnnnnnnnnnnnnnnnnnnnnnnnnnnnnnnnnnnnnnnnnnnnnnnnnnnnnnnnnnnnnnnnnnnnnnnnnnnnnnnnnnnnnnnnnnnnnnnnnnnnnnnnnnnnnnnnnnnnnnnnnnnnnnnnnnnnnnnnnnnnnnnnnnnnnnnnnnnnnnnnnnnnnnnnnnnnnnnnnnnnnnnnnnnnnnnnnnnnnnnnnnnnnnnnnnnnnnnnnnnnnnnnnnnnnnnnnnnnnnnnnnnnnnnnnnnnnnnnnnnnnnnnnnnnnnnnnnnnnnnnnnnnnnnnnnnnnnnnnnnnnnnnnnnnnnnnnnnnnnnnnnnnnnnnnnnnnnnnnnnnnnnnnnnnnnnnnnnnnnnnnnnnnnnnnnnnnnnnnnnnnnnnnnnnnnnnnnnnnnnnnnnnnnnnnnnnnnnnnnnnnnnnnnnnnnnnnnnnnnnnnnnnnnnnnnnnnnnnnnnnnnnnnnnnnnnnnnnnnnnnnnnnnnnnnnnnnnnnnnnnnnnnnnnnnnnnnnnnnnnnnnnnnnnnnnnnnnnnnnnnnnnnnnnnnnnnnnnnnnnnnnnnnnnnnnnnnnnnnnnnnnnnnnnnnnnnnnnnnnnnnnnnnnnnnnnnnnnnnnnnnnnnnnnnnnnnnnnnnnnnnnnnnnnnnnnnnnnnnnnnnnnnnnnnnnnnnnnnnnnnnnnnnnnnnnnnnnnnnnnnnnnnnnnnnnnnnnnnnnnnnnnnnnnnnnnnnnnnnnnnnnnnnnnnnnnnnnnnnnnnnnnnnnnnnnnnnnnnnnnnnnnnnnnnnnnnnnnnnnnnnnnnnnnnnnnnnnnnnnnnnnnnnnnnnnnnnnnnnnnnnnnnnnnnnnnnnnnnnnnnnnnnnnnnnnnnnnnnnnnnnnnnnnnnnnnnnnnnnnnnnnnnnnnnnnnnnnnnnnnnnnnnnnnnnnnnnnnnnnnnnnnnnnnnnnnnnnnnnnnnnnnnnnnnnnnnnnnnnnnnnnnnnnnnnnnnnnnnnnnnnnnnnnnnnnnnnnnnnnnnnnnnnnnnnnnnnnnnnnnnnnnnnnnnnnnnnnnnnnnnnnnnnnnnnnnnnnnnnnnnnnnnnnnnnnnnnnnnnnnnnnnnnnnnnnnnnnnnnnnnnnnnnnnnnnnnnnnnnnnnnnnnnnnnnnnnnnnnnnnnnnnnnnnnnnnnnnnnnnnnnnnnnnnnnnnnnnnnnnnnnnnnnnnnnnnnnnnnnnnnnnnnnnnnnnnnnnnnnnnnnnnnnnnnnnnnnnnnnnnnnnnnnnnnnnnnnnnnnnnnnnnnnnnnnnnnnnnnnnnnnnnnnnnnnnnnnnnnnnnnnnnnnnnnnnnnnnnnnnnnnnnnnnnnnnnnnnnnnnnnnnnnnnnnnnnnnnnnnnnnnnnnnnnnnnnnnnnnnnnnnnnnnnnnnnnnnnnnnnnnnnnnnnnnnnnnnnnnnnnnnnnnnnnnnnnnnnnnnnnnnnnnnnnnnnnnnnnnnnnnnnnnnnnnnnnnnnnnnnnnnnnnnnnnnnnnnnnnnnnnnnnnnnnnnnnnnnnnnnnnnnnnnnnnnnnnnnnnnnnnnnnnnnnnnnnnnnnnnnnnnnnnnnnnnnnnnnnnnnnnnnnnnnnnnnnnnnnnnnnnnnnnnnnnnnnnnnnnnnnnnnnnnnnnnnnnnnnnnnnnnnnnnnnnnnnnnnnnnnnnnnnnnnnnnnnnnnnnnnnnnnnnnnnnnnnnnnnnnnnnnnnnnnnnnnnnnnnnnnnnnnnnnnnnnnnnnnnnnnnnnnnnnnnnnnnnnnnnnnnnnnnnnnnnnnnnnnnnnnnnnnnnnnnnnnnnnnnnnnnnnnnnnnnnnnnnnnnnnnnnnnnnnnnnnnnnnnnnnnnnnnnnnnnnnnnnnnnnnnnnnnnnnnnnnnnnnnnnnnnnnnnnnnnnnnnnnnnnnnnnnnnnnnnnnnnnnnnnnnnnnnnnnnnnnnnnnnnnnnnnnnnnnnnnnnnnnnnnnnnnnnnnnnnnnnnnnnnnnnnnnnnnnnnnnnnnnnnnnnnnnnnnnnnnnnnnnnnnnnnnnnnnnnnnnnnnnnnnnnnnnnnnnnnnnnnnnnnnnnnnnnnnnnnnnnnnnnnnnnnnnnnnnnnnnnnnnnnnnnnnnnnnnnnnnnnnnnnnnnnnnnnnnnnnnnnnnnnnnnnnnnnnnnnnnnnnnnnnnnnnnnnnnnnnnnnnnnnnnnnnnnnnnnnnnnnnnnnnnnnnnnnnnnnnnnnnnnnnnnnnnnnnnnnnnnnnnnnnnnnnnnnnnnnnnnnnnnnnnnnnnnnnnnnnnnnnnnnnnnnnnnnnnnnnnnnnnnnnnnnnnnnnnnnnnnnnnnnnnnnnnnnnnnnnnnnnnnnnnnnnnnnnnnnnnnnnnnnnnnnnnnnnnnnnnnnnnnnnnnnnnnnnnnnnnnnnnnnnnnnnnnnnnnnnnnnnnnnnnnnnnnnnnnnnnnnnnnnnnnnnnnnnnnnnnnnnnnnnngtacaggccaatgatgaggatggtagcccgatcgcttgcgcccggcttcacgaccgaggccctacgccgtcgccggaccatacaattcattgtccccaatatgaaacccaaacctgaaccggtcaagaaagatacccggaagaaagggggcgcgagcgaatgacgcctaccgagatgttcatcaaaaccctgacgaacctcaaaaccggcgacctcagcctcctgcgcacgcacgcaggacaaggtctcgatgagtcgctggaaggattcgacctcttcaccggaatctggtggcccttgcgcgagaagaatcaagctgcaccgcgccgttcagtggcatggctgatcgcgaagctctacgcgttctgtcccatccaccaggagcggggatgcgcgctcgccgcgcaattacgccgttgccgacccagcgaacagttctttaagaagtgtgacaggctgctcctgttgccgaacgaccggttggaaccagctcttcaatgggcaatcggaacccttgcttcaaataaattgcggctcgactgggtgcaactaacggacgatttatccatttgggaacgtgaaacaacccgcctcaggtgggcggaacaattactcgaaaacagggaggagaaatagacatgttgatcgaaatccacgccatccaaaaccacagcccggccaacctgaaccgggacgacctcggcgcacccaagacctgctacttcggcggcgtgctgcggtcgcgcatctccagccagtgcatcaagcgcagtatccgaacaagcgagcagttcaaggccttgtgcggcggaatccgtacccggcagttggcaaaattgattgctgaaaaggtaaccggcaaggccgatgtgaagaagcgcgcggcaaagatcctcaaggaatgcggcatcgctccaaaagacgaagacaagagcgacatgctcgtttacacgacgcaagaggcgatccaggagatggcggcgcttctgcaagatggcgacggaaagaccgatgaacaactggcgcaggccttcggcaacctaatcgctgatcggaccgccgtgcctgatatggcactcagcggcagaatgctcgaaaccggtgtcctgaaagacacgaccgtagaggctgcgttgcaggtaggccacgccatttctacgcacgaggcgcgcccggaagtggactactatgtcgccgccgacgacatccccggcgatgacgcgggagcgggttatgtggacgaagcaatgtttgcgtccgcctgtttctacaagtatttctcgatccactgggagacgctggtcgaaaatctgaagggcaacgaggagttggcggcccacacggtcggcgcattcattcgcgcggcggcattggcgaatccgacaggcaagcagaacagtttcgccgcccacaatccgcccgacgcgctcctcatcgagatcaaagataccccggttagctatgccaacgccttcgccaaaccggccgcgcaaggcgaacgcgacatcatcgcgcagagcattgctcaattggcgcagtacgttcacgacctcgatgtcggatatggccagccgcgacagcgattctggttctctcccaatctccgctataccttgagcgccgtgcaggataagaaggagatcgcactttctgaaaacaaccttcgagcgctcgacgaattgattcctgccgtgattgccgcaatcggccatgactgggaggaagtccagaaggttgtcgcaaaccatgaggtggccccatgagcgctaacaccctctttcttcgcctcgaaggtcccttgcaggcatggggcgatcagcagtcgaaattcgtcatccgccggaccgccgaagcgccgaccaagtccggcgtcatcggtatgctctgcgccgcattgggcgtatcgcgcgccgatgcccccgccgagtggctgccgaagctcggcgcgctgcgcatgggagttcgcatcgatgtgccgggcattcgatggtgggactatcacacggtcggcgcgggcatggaaatgcgcattgccgaagcagagggaaagaccaaacccggcgcgatgctcacgcggcgcgaatacctctgcgacgcgtcttttctcgtcgccctgcaaggcgatcccgctctcgttgccgaactggaagcggccctgaaagcacccaagtggacgctctatcttggacggaaatgctgtccgccctcgcgtcccgtgatgcaacatccatccggttcctttgaagatctccgttccgcgctcgcgtccgtgccatggcaagcccgactcaaaggagatacaccgcctaagtgtgtcgagtgtctcgttgactgggaatccacggaggaacaacctgaagcgcccgacgatgccctcgtctggtacgacgtgccgttgacattcgaaccaccggcacatcgcccacgattcgtcattcgcgagcaattgtccgttggcattgatggcgtcctaagcattgccgagacccccgcacaacggtttacaccgccgccgccgcgtcctcgagccgattatggcaacaaggaatacaaggatcgacgtaaagcccgcctcgaacaagaccaccatctctgcgtcttctgcaagtcgcccgcaaccactgttcagcacgtcacctatcgccgtgccggtggagacgagcagatagacgatctgcgttccctctgccgcctgtgccacgacgccgtcaccatgatcgagtacggccttggcatgggcctcgaccgtatcaaccccgaagaacaacgctggcgaaacaagatcatcgagaaacgcgacgaaatcgtcaaattccgttcgctggagacaaggcggcggcgtctcagcccagaggaggtcgaataatgttcctgtcccatctcttgatcgataccggaggcaatcccgaccgcccaagacccggcaggaaatggctccgcaacgtctatcacgtccatcagcgcctgtgcatggcctttccttcaaacatgcgtgtgcaggacgatccggagttcctcaagcccttcaagggagaagatttcccgttgcgcgggaacgcgaacgcggatccgcgcaatccccggcacagtttcctgttccgcatagacaacggcatcgagagcgatgccccgcgcgccatcatcctcgtccagtccgaactgaaacccaattgggactacgccttccacaacgcgcgcgtctttctcgcggccgacccggaaacccgcgaatacaaccccgcctttaccaccggcgacacgctccgttttcgcatccgaatcaacctaagcaagaagattcagtccaatagagaaggtatcgatcttcgaaaaccgcgagtggggatagacgccaaaggacgtcaaaaagatcaaagcaagcgagtggctctcacatggaacgacgatcagaagccggaagacgtaatcgtgccgtggtttgccgagaaaggcgccaaacgaggctttgaagtgaaaggtgcggcccttcttcaacttggctggtcgtcgggatttacggcggaaaaagaaaaggggatgaaattccggtccgccctgctcgaaggcacgcttgccgtggccaatcccgtgctcttttcccaaacgctggcgtcggggattggcgcggcgaaagccttcggattcggactcttgagcgtcgcgccatgcaatgtgaacccgtgacatgcgcacacacgatctgcacgaattgccgaaagtgagagacaaactcggttatctgtacgtcgagcattgtcgcatcgatcaggaagacaaggcgatcgctttgcatgatgaaaccggcgttacctccgttccatgtgcggccctttccctgctcatgctcggacccggcaccagcattacccatgcggccatactcacgctggccgacagtgcctgtcttaccgcatggtgcggcgagcaaggcatccgatactatgcctccggctccggggcgacccgcgacgcgtatgccctgctccggcaagccgccctttgttccgatgatgccgcccggctgaaagtcgtccgaagactttacgaggcccggttcaaagggaaaatcgacccctccctgacgcttcagcaactccgtgggcgtgaaggcgttcgcgttcgcgacgcctatgcccatgccgcgcgggaaacggggattcaatggcaagggcgaaactacgatcgcggcaactggaacgccgccgatcccgtcaatcgagcgctttccgccgccaatgcctgtctctacggtatctgccaggccgccatcattgccgccggttactccacggcgctcggttttatccacacgggaaagcaactttcctttgtttacgacattgccgatctttacaaatgcgacatgaccgttccactcgcttttcatgtcgcggccggccatcccatcaacttggagcgggaagtccgaatacaatgccgcgacgtgttcgcggaacaacgccttcttcaacggatcgttgacgatatcgcccagatcctcgatatcccacctgacgaagatacgcgtttggatgaggatccggccctgcccggcgcactctgggatccccggcaaggatcatgtccgggcggcatacaatacggtgctgatgactccggagatattggacatggtgatcatgattcttgaatccgtctcgccatcccttcgtggacaactcacgcggtggctgctcgaaccaaaatcaggcgtctttgtcggatccatttcggccatggtccgccaaaaactttgggaaaaggtttgcaaggaagcacgagatggcggcgccatcctcatcttttccgccaagaacgaacaaggtttcagaatagacttctggggaaaaacaacccgatggattacaaattgggaaggacttcaactagttaccaaaccaaaatgccaataaattcaatgggtattccccacgcacgtgggggtgaaccggatcgcaagaatgaggcggcgcagcaccgaatgtattccccacgcacgtgggggtgaaccggcggagatggtaagggagaaaataaaagaggggtattccccacgcacgtgggggtgaaccgagcaatgccgcgtatgaacaggccgcgcacaagtattccccacgcacgtgggggtgaaccgagcaatgccgcgtatgaacaggccgcgcacaagtattccccacgcacgtgggggtgaaccgatccgccggtggccgcgccaagcgcgaatccggtattccccacgcacgtgggggtgaaccaagccgcccgactgatcgccgaggcgcgggcgcgtattccccacgcacgtgggggtgaaccgatttttgggatgctgttggtgccaaagtagtagtattccccacgcacgtgggggtgaaccgacgtattataactcgcccgcgggccgaggtacgtattccccacgcacgtgggggtgaaccagatgcaaaagagatggcggcgactaccacggcgtattccccacgcacgtgggggtgaaccgtatgtctcggaagaacagaaaacggccatagcgtattccccacgcacgtgggggtgaaccgaccgcgagtacattgaagaacatgccacagaagtattccccacgcacgtgggggtgaaccgtaacaaataaagcgtaaagagaaagcaaatacgtattccccacgcacgtgggggtgaaccggttcttgctgttgaagtgtgtggaacggtgacgtattccccacgcacgtgggggtgaaccgtttccatgatcttttcataatcgggatcttttgtattccccacgcacgtgggggtgaaccgagcattgaggtttcgccgcaaagcggcgaaacgtattccccacgcacgtgggggtgaaccgatcgaatcagggaaatgacacacacagatgatgtattccccacgcacgtgggggtgaaccgtcaacctcacgcgcatataacaggatccgcacgtattccccacgcacgtgggggtgaaccggaattggcgcgcagaataatgcggtccaatcggtattccccacgcacgtgggggtgaaccgtcaatccccgcgcgcatgcggggcttttacctgttggagccgcgagccgcaaaggcgcaaattttttggtgttattccctttttcatgatagtcctgaattttcgaacgttgttacaggcagccattactgaaaaaagttgttttttccggttgaatgggttacagaatcgttttgaggcattgaaggcggagtttcaccgggagccgaaatcggggcaagtgtgtgggacaggctgtccagcctgtccgtccacggacagggtgtgggttcggaagcggcaaggatgctgtgtttaccgtagaagcggcctgttgccgcttttccgtttgttggagggcgtgcgatttcgtcatgtggcgtcgaattccgattgggcccacagggtatgcgcaatcgggtgtggcaggaaaagcggagcaatgaatgggcgcgcctcccggaaaaaataaaggacgcctcactgggaggcgcccagggcatcccgtaggatggcgcccgcggatcgaaagatccttactatgatttgaaggtcaatcgccgctcaggtatactaaactatattataaacattccttccgggaatgtcaagtttttggttttcgggtgttgttcagatggggaggcctgtcatgaaaaaggcaaatgaatcgctggtgctgggactggaccttggaaccaactcgatcggctgggcgctgttcggatttgacggcgataatcccgtccgccttgtcggcatgggatcgcgcattttcgaggccggaaccgagggcgatatcgaggcgggaaaagacgaatcacgcggcgtggcacgccgaatggcgaggcaaatccgccggcagggcgaacggcgtgcaaggcggcaatccaaggtgggccgtgtgctgcaagccatgggactcctgcccgaaggggatatcgatcattcacaagcccgtcacgaatatttcgtgacactcgaccggacattgcgtgcccgccacaagaaggttaatttggaagcactgccgcatgtctttccgtattggctgagagcccgcgcactggacaatccactcgaacgggacgaactcggacgggccttctaccatctcggacaacggcgcggatttttaagcaaccgcaaggcctccggaaagaaggatgaggaaaagagcgtcgtgaaacagggcatcgccgaattggccgcggcaatacatgaaaccggcgcgcgcaccctcggcgaatacctcagccgtatagacccttcggatcccgaacagcgccgcatccgcgaacgctggaccgcccgccaaatgtacgaagacgaattcaacgccatttgggacgcccaatcgaaacatcatcccgaagtgcttacaccggaatggcggaaaatccttcataacgccctcttccggcagcgaccactcaaactccagcacgatctgatcggggcatgtccgcttgaaccggatcgcaaacgggcgcccatggccctgcccgccgcccagcgatttcgtgtacttcaaaaggtcaatgacctccgcgtcatcgcgcccgactattccgaacgcccgctcaatcccgaagaacgcaccctactgctcgacgccctcgaccgccaagaggaaatgaccttcggcaagctccgcaaactgctgaacctcaaagcgtacgtcttcaatctcgaaaacggcggcgaagaaaagctcattggcaatcgcacatccgccaagatgtacggcattttcggcgaacgctggttccggttcacgcccgcccaacgcgaggccgtcattcaagacatccgttgtttcgaaaaagacgccgcccttgctaagcgcgggcgcgagcactacggactcgatgaagagacggcaaaacgtttcggggaaatcgaactcgaagacgggtattgttcgctctcccggcaagctatcgaaaagctcttgccgctcatggagaaggggatcgcctataagacggccgaaaaagaagtctatggcgatccgggaccggccatcgctgtcgaaatgcttccgagtgtggccgaggccgtccgccagcaactcatgcccgtcctgcgcaatcccgtcgtcaatcgtgttctgaccgaactgcgcaaagtggtcaatgcgatcatcaacaagtacggcaagccggacaagattcggatcgaaatcgcgcgcgacatgaaaaaaccacggcaggagcgcatgaaaatcagccgaaaaatgcgggacaacgaaaaatcccggcaaaaggcggccaagcgcatttttgaggaaataggcgtgcagaatccctcccgcgacgatatcgaaaaggttctgctggccgaggaatgcgaatggcgatgcccctataccggcaagacaatcagcatgcgcaccctgttgggcgatgcgccgcaattcgatgttgaacacatcatcccgttcagccggtgcttggacaattccttcaacaacaagacgctctgctaccacgaggagaaccggagcgtcaaacgcaatcgcacaccgcacgaggcctatggcggcgatcccgcacgctatcaggagatcctcgatcgtgtcgctaaattcaagggtgaaggccgcgatgccaaactccgccgcttccagatggcggacctcgaggatttcgaggatttttccacccgcatgctcaacgacacccgctacgcctcgacgctggccgcgaaatatctcggactgctctacggcgccgagtaccgaaaacacatccaagtcagcaccggcgtcatcaccaagtacctgcgcgactgctgggggctcaacaaggtcctcggcgacggcggcgagaagaaccgcgaagatcaccgccaccacgccgtggacgccgtcgccatcgcgctgaccagcccgaaaaccgtcaagatgctcagcgacgccgccaagcacgccaccgaggaacgccgccgccagttcggaaaggtcccgcctccgtgggaccgtttccttcaggacattcaggaagccgccggtcaaatcgtcgtttcgcaccgcgtcgcacgcaaagtcaacggccgcatgcacgaggatacattctacagcccgcaaccctcttccgatccggccaaaccgtgcgtccatgtccgtaaacgcgtcgaggcactgtccaagggagaaatcgaggccatcgttgatcccatcgtgcggcgacaggtcaaacaacggctcgacgaactggacagcgacgatcccaagaaggcattcgccacagccgaaaaacatcccttcatcgaaaccggcgatggacgccgcctgcccattcacaaggtccgcatccgcaagaatgccgccacattcaagatcggcaaagagcatcgggtgcgccatgtcaccaccgattccaatcatcatgtcgaaatcatcgaaacgacggacaagcgcggaaatgtgaagtgggagggatccgttgtaagccggtacgaagccatgcgacgactccaaaaccgcgaacctgtcatcaagcgtgatcacggcaacggaagaaagttcctcttttcgctggcgttgaatgaagtcgtgcagatgaaggacacggaaggcgttgtacggcaatacagggtagcaggtgtgtcacagttctcaaccggccaaatagtaattgatgtccgcgagcttagcgatgcgcgtcgtgcggttgatgttcctcgtgaaggacgtacccgttcgccggacacgctccgtaagtctgaatctatcaagttttgcgcaaccccccttggggagcttcgtcgggcgaatgattgagcggatcatagacttgagcacggatgccgtccggctgtccgtgaacatggagcggctgctgatcgagcggcacaattccgattcgatcacgatgtccgccgagccggttacggttccgctagacgaggtggcggccgtcgtggcgtcgcaccggcaggtcgtcttcacgcagcctgcgctagcggggattgccgcgcatggcggggcggtcgtcgtgtgcgacggcaagatgatgccggtcggcatgatgctgcccatcgaacagcatcatctccaggccgaacggttcgtcaagcaagccgaagcggcgcttcccgtcaagaaacagatctggcgtcagattgtccaggcgaaaatcgccgcgcaggggcgcacgctcctcgacttccgcaagagcgatttcggatttttcgagatggccaaacgcgtcaagtcgggcgacacggacaatatcgaagcccacgccgcgcggcgctactggccgctgttgttcgacgatccggcattcaagcgcgaacgggaagcgccggaccagaaccgctttctcaactatggctacacggtcctgcgcgcgatggttgcccgcgcgatttgcgccaccggcctccacccatcccttggcgtccatcatcacaaccgctacgacgcgttttgtctcgccgacgaccttatggaacccttccggcccgtcgtggaccgcgccgtcgtccatatcgtctattcgcgcggcaaggaagcgcccatggacaaggaaaccaaggccgcactaatcggcgcggtgaccgggcgctatcggctcgatggtgagtctcgcaccctgttcgatattctttcccgcaccgccgcgtcgctggcgaaaatctttaccggcgaaggcaaggaactcgccttgccggtgatttaggtgattcaccacgaaggacacgaaggacacgaagaagaagtcggagttgatagacaaagttgaacattgtgcggtaggatttttttgctgcaagaggaccgcgcatgcacgaattgccggatgcgcggaagacatggaaatgaaagcaatttcgtgggccgagccgtcgtcttgattggtttcttgttccttctcttccggttcgtcttcgtgcttttcgtgttcttcgtggtgaagataccaatcaaccgaaacaaggagatgacaccatggaattcgatgccctgagcaatcgggtcatcggctgcgccatcgaggcacaccgcgaactcggtcccggcctgctcgaatccacctatgaaaaatgtctcgcatatgaactgtccacgcatggcatgaccgtggccacgcaggtcgaattgcccgtacgctacaagggggtcctcctcgattgcggctatcgcatagacgtgctggttgatgaccagatcatcatcgaagtcaagtccgtggacaaagtgattccgattcacgaggcccaattgctgacctatctcaagctcgcaaagaagcgcatcggactgctcatgaatttcaacacggtccgattgaaagacggtatccgccgatttgtaatgtgaagattcaccacgaagagcacgaagggcacgaagaaagaaagagaatgccgggtggtaaatggataacaatagggttggtggtgttttgtggttgaaaaagtcggttgtgtgtgtctgaaacttgaaaaatacaatgaatatgcacactctaatttatctggacctcctaccgcctgccgatagattgtttttctgtccttcttcgtgtttttcgttttcttcgtggtgaggataccaatcaactgaaacaaggagatgacatcatggaattcgatttgtgctgtgaagattcaccacgaagagcacgaagagcacgaagaaagaaaaagaatgccgggtggtaaatggataacaatagggttggtggtgttttgtggttgaaaaagtcggttgtgtgtgtctgaaacttgaaaaatacaatgaatatgcacactctaatttatctggacctcct

SEQ ID NO: 1023 - DNA, 107368 bp, Artificial Sequence
  Synthetic Oligonucleotide
  misc_feature (1)..(95619): n is a, c, g, or t
nnnnnnnnnnnnnnnnnnnnnnnnnnnnnnnnnnnnnnnnnnnnnnnnnnnnnnnnnnnnnnnnnnnnnnnnnnnnnnnnnnnnnnnnnnnnnnnnnnnnnnnnnnnnnnnnnnnnnnnnnnnnnnnnnnnnnnnnnnnnnnnnnnnnnnnnnnnnnnnnnnnnnnnnnnnnnnnnnnnnnnnnnnnnnnnnnnnnnnnnnnnnnnnnnnnnnnnnnnnnnnnnnnnnnnnnnnnnnnnnnnnnnnnnnnnnnnnnnnnnnnnnnnnnnnnnnnnnnnnnnnnnnnnnnnnnnnnnnnnnnnnnnnnnnnnnnnnnnnnnnnnnnnnnnnnnnnnnnnnnnnnnnnnnnnnnnnnnnnnnnnnnnnnnnnnnnnnnnnnnnnnnnnnnnnnnnnnnnnnnnnnnnnnnnnnnnnnnnnnnnnnnnnnnnnnnnnnnnnnnnnnnnnnnnnnnnnnnnnnnnnnnnnnnnnnnnnnnnnnnnnnnnnnnnnnnnnnnnnnnnnnnnnnnnnnnnnnnnnnnnnnnnnnnnnnnnnnnnnnnnnnnnnnnnnnnnnnnnnnnnnnnnnnnnnnnnnnnnnnnnnnnnnnnnnnnnnnnnnnnnnnnnnnnnnnnnnnnnnnnnnnnnnnnnnnnnnnnnnnnnnnnnnnnnnnnnnnnnnnnnnnnnnnnnnnnnnnnnnnnnnnnnnnnnnnnnnnnnnnnnnnnnnnnnnnnnnnnnnnnnnnnnnnnnnnnnnnnnnnnnnnnnnnnnnnnnnnnnnnnnnnnnnnnnnnnnnnnnnnnnnnnnnnnnnnnnnnnnnnnnnnnnnnnnnnnnnnnnnnnnnnnnnnnnnnnnnnnnnnnnnnnnnnnnnnnnnnnnnnnnnnnnnnnnnnnnnnnnnnnnnnnnnnnnnnnnnnnnnnnnnnnnnnnnnnnnnnnnnnnnnnnnnnnnnnnnnnnnnnnnnnnnnnnnnnnnnnnnnnnnnnnnnnnnnnnnnnnnnnnnnnnnnnnnnnnnnnnnnnnnnnnnnnnnnnnnnnnnnnnnnnnnnnnnnnnnnnnnnnnnnnnnnnnnnnnnnnnnnnnnnnnnnnnnnnnnnnnnnnnnnnnnnnnnnnnnnnnnnnnnnnnnnnnnnnnnnnnnnnnnnnnnnnnnnnnnnnnnnnnnnnnnnnnnnnnnnnnnnnnnnnnnnnnnnnnnnnnnnnnnnnnnnnnnnnnnnnnnnnnnnnnnnnnnnnnnnnnnnnnnnnnnnnnnnnnnnnnnnnnnnnnnnnnnnnnnnnnnnnnnnnnnnnnnnnnnnnnnnnnnnnnnnnnnnnnnnnnnnnnnnnnnnnnnnnnnnnnnnnnnnnnnnnnnnnnnnnnnnnnnnnnnnnnnnnnnnnnnnnnnnnnnnnnnnnnnnnnnnnnnnnnnnnnnnnnnnnnnnnnnnnnnnnnnnnnnnnnnnnnnnnnnnnnnnnnnnnnnnnnnnnnnnnnnnnnnnnnnnnnnnnnnnnnnnnnnnnnnnnnnnnnnnnnnnnnnnnnnnnnnnnnnnnnnnnnnnnnnnnnnnnnnnnnnnnnnnnnnnnnnnnnnnnnnnnnnnnnnnnnnnnnnnnnnnnnnnnnnnnnnnnnnnnnnnnnnnnnnnnnnnnnnnnnnnnnnnnnnnnnnnnnnnnnnnnnnnnnnnnnnnnnnnnnnnnnnnnnnnnnnnnnnnnnnnnnnnnnnnnnnnnnnnnnnnnnnnnnnnnnnnnnnnnnnnnnnnnnnnnnnnnnnnnnnnnnnnnnnnnnnnnnnnnnnnnnnnnnnnnnnnnnnnnnnnnnnnnnnnnnnnnnnnnnnnnnnnnnnnnnnnnnnnnnnnnnnnnnnnnnnnnnnnnnnnnnnnnnnnnnnnnnnnnnnnnnnnnnnnnnnnnnnnnnnnnnnnnnnnnnnnnnnnnnnnnnnnnnnnnnnnnnnnnnnnnnnnnnnnnnnnnnnnnnnnnnnnnnnnnnnnnnnnnnnnnnnnnnnnnnnnnnnnnnnnnnnnnnnnnnnnnnnnnnnnnnnnnnnnnnnnnnnnnnnnnnnnnnnnnnnnnnnnnnnnnnnnnnnnnnnnnnnnnnnnnnnnnnnnnnnnnnnnnnnnnnnnnnnnnnnnnnnnnnnnnnnnnnnnnnnnnnnnnnnnnnnnnnnnnnnnnnnnnnnnnnnnnnnnnnnnnnnnnnnnnnnnnnnnnnnnnnnnnnnnnnnnnnnnnnnnnnnnnnnnnnnnnnnnnnnnnnnnnnnnnnnnnnnnnnnnnnnnnnnnnnnnnnnnnnnnnnnnnnnnnnnnnnnnnnnnnnnnnnnnnnnnnnnnnnnnnnnnnnnnnnnnnnnnnnnnnnnnnnnnnnnnnnnnnnnnnnnnnnnnnnnnnnnnnnnnnnnnnnnnnnnnnnnnnnnnnnnnnnnnnnnnnnnnnnnnnnnnnnnnnnnnnnnnnnnnnnnnnnnnnnnnnnnnnnnnnnnnnnnnnnnnnnnnnnnnnnnnnnnnnnnnnnnnnnnnnnnnnnnnnnnnnnnnnnnnnnnnnnnnnnnnnnnnnnnnnnnnnnnnnnnnnnnnnnnnnnnnnnnnnnnnnnnnnnnnnnnnnnnnnnnnnnnnnnnnnnnnnnnnnnnnnnnnnnnnnnnnnnnnnnnnnnnnnnnnnnnnnnnnnnnnnnnnnnnnnnnnnnnnnnnnnnnnnnnnnnnnnnnnnnnnnnnnnnnnnnnnnnnnnnnnnnnnnnnnnnnnnnnnnnnnnnnnnnnnnnnnnnnnnnnnnnnnnnnnnnnnnnnnnnnnnnnnnnnnnnnnnnnnnnnnnnnnnnnnnnnnnnnnnnnnnnnnnnnnnnnnnnnnnnnnnnnnnnnnnnnnnnnnnnnnnnnnnnnnnnnnnnnnnnnnnnnnnnnnnnnnnnnnnnnnnnnnnnnnnnnnnnnnnnnnnnnnnnnnnnnnnnnnnnnnnnnnnnnnnnnnnnnnnnnnnnnnnnnnnnnnnnnnnnnnnnnnnnnnnnnnnnnnnnnnnnnnnnnnnnnnnnnnnnnnnnnnnnnnnnnnnnnnnnnnnnnnnnnnnnnnnnnnnnnnnnnnnnnnnnnnnnnnnnnnnnnnnnnnnnnnnnnnnnnnnnnnnnnnnnnnnnnnnnnnnnnnnnnnnnnnnnnnnnnnnnnnnnnnnnnnnnnnnnnnnnnnnnnnnnnnnnnnnnnnnnnnnnnnnnnnnnnnnnnnnnnnnnnnnnnnnnnnnnnnnnnnnnnnnnnnnnnnnnnnnnnnnnnnnnnnnnnnnnnnnnnnnnnnnnnnnnnnnnnnnnnnnnnnnnnnnnnnnnnnnnnnnnnnnnnnnnnnnnnnnnnnnnnnnnnnnnnnnnnnnnnnnnnnnnnnnnnnnnnnnnnnnnnnnnnnnnnnnnnnnnnnnnnnnnnnnnnnnnnnnnnnnnnnnnnnnnnnnnnnnnnnnnnnnnnnnnnnnnnnnnnnnnnnnnnnnnnnnnnnnnnnnnnnnnnnnnnnnnnnnnnnnnnnnnnnnnnnnnnnnnnnnnnnnnnnnnnnnnnnnnnnnnnnnnnnnnnnnnnnnnnnnnnnnnnnnnnnnnnnnnnnnnnnnnnnnnnnnnnnnnnnnnnnnnnnnnnnnnnnnnnnnnnnnnnnnnnnnnnnnnnnnnnnnnnnnnnnnnnnnnnnnnnnnnnnnnnnnnnnnnnnnnnnnnnnnnnnnnnnnnnnnnnnnnnnnnnnnnnnnnnnnnnnnnnnnnnnnnnnnnnnnnnnnnnnnnnnnnnnnnnnnnnnnnnnnnnnnnnnnnnnnnnnnnnnnnnnnnnnnnnnnnnnnnnnnnnnnnnnnnnnnnnnnnnnnnnnnnnnnnnnnnnnnnnnnnnnnnnnnnnnnnnnnnnnnnnnnnnnnnnnnnnnnnnnnnnnnnnnnnnnnnnnnnnnnnnnnnnnnnnnnnnnnnnnnnnnnnnnnnnnnnnnnnnnnnnnnnnnnnnnnnnnnnnnnnnnnnnnnnnnnnnnnnnnnnnnnnnnnnnnnnnnnnnnnnnnnnnnnnnnnnnnnnnnnnnnnnnnnnnnnnnnnnnnnnnnnnnnnnnnnnnnnnnnnnnnnnnnnnnnnnnnnnnnnnnnnnnnnnnnnnnnnnnnnnnnnnnnnnnnnnnnnnnnnnnnnnnnnnnnnnnnnnnnnnnnnnnnnnnnnnnnnnnnnnnnnnnnnnnnnnnnnnnnnnnnnnnnnnnnnnnnnnnnnnnnnnnnnnnnnnnnnnnnnnnnnnnnnnnnnnnnnnnnnnnnnnnnnnnnnnnnnnnnnnnnnnnnnnnnnnnnnnnnnnnnnnnnnnnnnnnnnnnnnnnnnnnnnnnnnnnnnnnnnnnnnnnnnnnnnnnnnnnnnnnnnnnnnnnnnnnnnnnnnnnnnnnnnnnnnnnnnnnnnnnnnnnnnnnnnnnnnnnnnnnnnnnnnnnnnnnnnnnnnnnnnnnnnnnnnnnnnnnnnnnnnnnnnnnnnnnnnnnnnnnnnnnnnnnnnnnnnnnnnnnnnnnnnnnnnnnnnnnnnnnnnnnnnnnnnnnnnnnnnnnnnnnnnnnnnnnnnnnnnnnnnnnnnnnnnnnnnnnnnnnnnnnnnnnnnnnnnnnnnnnnnnnnnnnnnnnnnnnnnnnnnnnnnnnnnnnnnnnnnnnnnnnnnnnnnnnnnnnnnnnnnnnnnnnnnnnnnnnnnnnnnnnnnnnnnnnnnnnnnnnnnnnnnnnnnnnnnnnnnnnnnnnnnnnnnnnnnnnnnnnnnnnnnnnnnnnnnnnnnnnnnnnnnnnnnnnnnnnnnnnnnnnnnnnnnnnnnnnnnnnnnnnnnnnnnnnnnnnnnnnnnnnnnnnnnnnnnnnnnnnnnnnnnnnnnnnnnnnnnnnnnnnnnnnnnnnnnnnnnnnnnnnnnnnnnnnnnnnnnnnnnnnnnnnnnnnnnnnnnnnnnnnnnnnnnnnnnnnnnnnnnnnnnnnnnnnnnnnnnnnnnnnnnnnnnnnnnnnnnnnnnnnnnnnnnnnnnnnnnnnnnnnnnnnnnnnnnnnnnnnnnnnnnnnnnnnnnnnnnnnnnnnnnnnnnnnnnnnnnnnnnnnnnnnnnnnnnnnnnnnnnnnnnnnnnnnnnnnnnnnnnnnnnnnnnnnnnnnnnnnnnnnnnnnnnnnnnnnnnnnnnnnnnnnnnnnnnnnnnnnnnnnnnnnnnnnnnnnnnnnnnnnnnnnnnnnnnnnnnnnnnnnnnnnnnnnnnnnnnnnnnnnnnnnnnnnnnnnnnnnnnnnnnnnnnnnnnnnnnnnnnnnnnnnnnnnnnnnnnnnnnnnnnnnnnnnnnnnnnnnnnnnnnnnnnnnnnnnnnnnnnnnnnnnnnnnnnnnnnnnnnnnnnnnnnnnnnnnnnnnnnnnnnnnnnnnnnnnnnnnnnnnnnnnnnnnnnnnnnnnnnnnnnnnnnnnnnnnnnnnnnnnnnnnnnnnnnnnnnnnnnnnnnnnnnnnnnnnnnnnnnnnnnnnnnnnnnnnnnnnnnnnnnnnnnnnnnnnnnnnnnnnnnnnnnnnnnnnnnnnnnnnnnnnnnnnnnnnnnnnnnnnnnnnnnnnnnnnnnnnnnnnnnnnnnnnnnnnnnnnnnnnnnnnnnnnnnnnnnnnnnnnnnnnnnnnnnnnnnnnnnnnnnnnnnnnnnnnnnnnnnnnnnnnnnnnnnnnnnnnnnnnnnnnnnnnnnnnnnnnnnnnnnnnnnnnnnnnnnnnnnnnnnnnnnnnnnnnnnnnnnnnnnnnnnnnnnnnnnnnnnnnnnnnnnnnnnnnnnnnnnnnnnnnnnnnnnnnnnnnnnnnnnnnnnnnnnnnnnnnnnnnnnnnnnnnnnnnnnnnnnnnnnnnnnnnnnnnnnnnnnnnnnnnnnnnnnnnnnnnnnnnnnnnnnnnnnnnnnnnnnnnnnnnnnnnnnnnnnnnnnnnnnnnnnnnnnnnnnnnnnnnnnnnnnnnnnnnnnnnnnnnnnnnnnnnnnnnnnnnnnnnnnnnnnnnnnnnnnnnnnnnnnnnnnnnnnnnnnnnnnnnnnnnnnnnnnnnnnnnnnnnnnnnnnnnnnnnnnnnnnnnnnnnnnnnnnnnnnnnnnnnnnnnnnnnnnnnnnnnnnnnnnnnnnnnnnnnnnnnnnnnnnnnnnnnnnnnnnnnnnnnnnnnnnnnnnnnnnnnnnnnnnnnnnnnnnnnnnnnnnnnnnnnnnnnnnnnnnnnnnnnnnnnnnnnnnnnnnnnnnnnnnnnnnnnnnnnnnnnnnnnnnnnnnnnnnnnnnnnnnnnnnnnnnnnnnnnnnnnnnnnnnnnnnnnnnnnnnnnnnnnnnnnnnnnnnnnnnnnnnnnnnnnnnnnnnnnnnnnnnnnnnnnnnnnnnnnnnnnnnnnnnnnnnnnnnnnnnnnnnnnnnnnnnnnnnnnnnnnnnnnnnnnnnnnnnnnnnnnnnnnnnnnnnnnnnnnnnnnnnnnnnnnnnnnnnnnnnnnnnnnnnnnnnnnnnnnnnnnnnnnnnnnnnnnnnnnnnnnnnnnnnnnnnnnnnnnnnnnnnnnnnnnnnnnnnnnnnnnnnnnnnnnnnnnnnnnnnnnnnnnnnnnnnnnnnnnnnnnnnnnnnnnnnnnnnnnnnnnnnnnnnnnnnnnnnnnnnnnnnnnnnnnnnnnnnnnnnnnnnnnnnnnnnnnnnnnnnnnnnnnnnnnnnnnnnnnnnnnnnnnnnnnnnnnnnnnnnnnnnnnnnnnnnnnnnnnnnnnnnnnnnnnnnnnnnnnnnnnnnnnnnnnnnnnnnnnnnnnnnnnnnnnnnnnnnnnnnnnnnnnnnnnnnnnnnnnnnnnnnnnnnnnnnnnnnnnnnnnnnnnnnnnnnnnnnnnnnnnnnnnnnnnnnnnnnnnnnnnnnnnnnnnnnnnnnnnnnnnnnnnnnnnnnnnnnnnnnnnnnnnnnnnnnnnnnnnnnnnnnnnnnnnnnnnnnnnnnnnnnnnnnnnnnnnnnnnnnnnnnnnnnnnnnnnnnnnnnnnnnnnnnnnnnnnnnnnnnnnnnnnnnnnnnnnnnnnnnnnnnnnnnnnnnnnnnnnnnnnnnnnnnnnnnnnnnnnnnnnnnnnnnnnnnnnnnnnnnnnnnnnnnnnnnnnnnnnnnnnnnnnnnnnnnnnnnnnnnnnnnnnnnnnnnnnnnnnnnnnnnnnnnnnnnnnnnnnnnnnnnnnnnnnnnnnnnnnnnnnnnnnnnnnnnnnnnnnnnnnnnnnnnnnnnnnnnnnnnnnnnnnnnnnnnnnnnnnnnnnnnnnnnnnnnnnnnnnnnnnnnnnnnnnnnnnnnnnnnnnnnnnnnnnnnnnnnnnnnnnnnnnnnnnnnnnnnnnnnnnnnnnnnnnnnnnnnnnnnnnnnnnnnnnnnnnnnnnnnnnnnnnnnnnnnnnnnnnnnnnnnnnnnnnnnnnnnnnnnnnnnnnnnnnnnnnnnnnnnnnnnnnnnnnnnnnnnnnnnnnnnnnnnnnnnnnnnnnnnnnnnnnnnnnnnnnnnnnnnnnnnnnnnnnnnnnnnnnnnnnnnnnnnnnnnnnnnnnnnnnnnnnnnnnnnnnnnnnnnnnnnnnnnnnnnnnnnnnnnnnnnnnnnnnnnnnnnnnnnnnnnnnnnnnnnnnnnnnnnnnnnnnnnnnnnnnnnnnnnnnnnnnnnnnnnnnnnnnnnnnnnnnnnnnnnnnnnnnnnnnnnnnnnnnnnnnnnnnnnnnnnnnnnnnnnnnnnnnnnnnnnnnnnnnnnnnnnnnnnnnnnnnnnnnnnnnnnnnnnnnnnnnnnnnnnnnnnnnnnnnnnnnnnnnnnnnnnnnnnnnnnnnnnnnnnnnnnnnnnnnnnnnnnnnnnnnnnnnnnnnnnnnnnnnnnnnnnnnnnnnnnnnnnnnnnnnnnnnnnnnnnnnnnnnnnnnnnnnnnnnnnnnnnnnnnnnnnnnnnnnnnnnnnnnnnnnnnnnnnnnnnnnnnnnnnnnnnnnnnnnnnnnnnnnnnnnnnnnnnnnnnnnnnnnnnnnnnnnnnnnnnnnnnnnnnnnnnnnnnnnnnnnnnnnnnnnnnnnnnnnnnnnnnnnnnnnnnnnnnnnnnnnnnnnnnnnnnnnnnnnnnnnnnnnnnnnnnnnnnnnnnnnnnnnnnnnnnnnnnnnnnnnnnnnnnnnnnnnnnnnnnnnnnnnnnnnnnnnnnnnnnnnnnnnnnnnnnnnnnnnnnnnnnnnnnnnnnnnnnnnnnnnnnnnnnnnnnnnnnnnnnnnnnnnnnnnnnnnnnnnnnnnnnnnnnnnnnnnnnnnnnnnnnnnnnnnnnnnnnnnnnnnnnnnnnnnnnnnnnnnnnnnnnnnnnnnnnnnnnnnnnnnnnnnnnnnnnnnnnnnnnnnnnnnnnnnnnnnnnnnnnnnnnnnnnnnnnnnnnnnnnnnnnnnnnnnnnnnnnnnnnnnnnnnnnnnnnnnnnnnnnnnnnnnnnnnnnnnnnnnnnnnnnnnnnnnnnnnnnnnnnnnnnnnnnnnnnnnnnnnnnnnnnnnnnnnnnnnnnnnnnnnnnnnnnnnnnnnnnnnnnnnnnnnnnnnnnnnnnnnnnnnnnnnnnnnnnnnnnnnnnnnnnnnnnnnnnnnnnnnnnnnnnnnnnnnnnnnnnnnnnnnnnnnnnnnnnnnnnnnnnnnnnnnnnnnnnnnnnnnnnnnnnnnnnnnnnnnnnnnnnnnnnnnnnnnnnnnnnnnnnnnnnnnnnnnnnnnnnnnnnnnnnnnnnnnnnnnnnnnnnnnnnnnnnnnnnnnnnnnnnnnnnnnnnnnnnnnnnnnnnnnnnnnnnnnnnnnnnnnnnnnnnnnnnnnnnnnnnnnnnnnnnnnnnnnnnnnnnnnnnnnnnnnnnnnnnnnnnnnnnnnnnnnnnnnnnnnnnnnnnnnnnnnnnnnnnnnnnnnnnnnnnnnnnnnnnnnnnnnnnnnnnnnnnnnnnnnnnnnnnnnnnnnnnnnnnnnnnnnnnnnnnnnnnnnnnnnnnnnnnnnnnnnnnnnnnnnnnnnnnnnnnnnnnnnnnnnnnnnnnnnnnnnnnnnnnnnnnnnnnnnnnnnnnnnnnnnnnnnnnnnnnnnnnnnnnnnnnnnnnnnnnnnnnnnnnnnnnnnnnnnnnnnnnnnnnnnnnnnnnnnnnnnnnnnnnnnnnnnnnnnnnnnnnnnnnnnnnnnnnnnnnnnnnnnnnnnnnnnnnnnnnnnnnnnnnnnnnnnnnnnnnnnnnnnnnnnnnnnnnnnnnnnnnnnnnnnnnnnnnnnnnnnnnnnnnnnnnnnnnnnnnnnnnnnnnnnnnnnnnnnnnnnnnnnnnnnnnnnnnnnnnnnnnnnnnnnnnnnnnnnnnnnnnnnnnnnnnnnnnnnnnnnnnnnnnnnnnnnnnnnnnnnnnnnnnnnnnnnnnnnnnnnnnnnnnnnnnnnnnnnnnnnnnnnnnnnnnnnnnnnnnnnnnnnnnnnnnnnnnnnnnnnnnnnnnnnnnnnnnnnnnnnnnnnnnnnnnnnnnnnnnnnnnnnnnnnnnnnnnnnnnnnnnnnnnnnnnnnnnnnnnnnnnnnnnnnnnnnnnnnnnnnnnnnnnnnnnnnnnnnnnnnnnnnnnnnnnnnnnnnnnnnnnnnnnnnnnnnnnnnnnnnnnnnnnnnnnnnnnnnnnnnnnnnnnnnnnnnnnnnnnnnnnnnnnnnnnnnnnnnnnnnnnnnnnnnnnnnnnnnnnnnnnnnnnnnnnnnnnnnnnnnnnnnnnnnnnnnnnnnnnnnnnnnnnnnnnnnnnnnnnnnnnnnnnnnnnnnnnnnnnnnnnnnnnnnnnnnnnnnnnnnnnnnnnnnnnnnnnnnnnnnnnnnnnnnnnnnnnnnnnnnnnnnnnnnnnnnnnnnnnnnnnnnnnnnnnnnnnnnnnnnnnnnnnnnnnnnnnnnnnnnnnnnnnnnnnnnnnnnnnnnnnnnnnnnnnnnnnnnnnnnnnnnnnnnnnnnnnnnnnnnnnnnnnnnnnnnnnnnnnnnnnnnnnnnnnnnnnnnnnnnnnnnnnnnnnnnnnnnnnnnnnnnnnnnnnnnnnnnnnnnnnnnnnnnnnnnnnnnnnnnnnnnnnnnnnnnnnnnnnnnnnnnnnnnnnnnnnnnnnnnnnnnnnnnnnnnnnnnnnnnnnnnnnnnnnnnnnnnnnnnnnnnnnnnnnnnnnnnnnnnnnnnnnnnnnnnnnnnnnnnnnnnnnnnnnnnnnnnnnnnnnnnnnnnnnnnnnnnnnnnnnnnnnnnnnnnnnnnnnnnnnnnnnnnnnnnnnnnnnnnnnnnnnnnnnnnnnnnnnnnnnnnnnnnnnnnnnnnnnnnnnnnnnnnnnnnnnnnnnnnnnnnnnnnnnnnnnnnnnnnnnnnnnnnnnnnnnnnnnnnnnnnnnnnnnnnnnnnnnnnnnnnnnnnnnnnnnnnnnnnnnnnnnnnnnnnnnnnnnnnnnnnnnnnnnnnnnnnnnnnnnnnnnnnnnnnnnnnnnnnnnnnnnnnnnnnnnnnnnnnnnnnnnnnnnnnnnnnnnnnnnnnnnnnnnnnnnnnnnnnnnnnnnnnnnnnnnnnnnnnnnnnnnnnnnnnnnnnnnnnnnnnnnnnnnnnnnnnnnnnnnnnnnnnnnnnnnnnnnnnnnnnnnnnnnnnnnnnnnnnnnnnnnnnnnnnnnnnnnnnnnnnnnnnnnnnnnnnnnnnnnnnnnnnnnnnnnnnnnnnnnnnnnnnnnnnnnnnnnnnnnnnnnnnnnnnnnnnnnnnnnnnnnnnnnnnnnnnnnnnnnnnnnnnnnnnnnnnnnnnnnnnnnnnnnnnnnnnnnnnnnnnnnnnnnnnnnnnnnnnnnnnnnnnnnnnnnnnnnnnnnnnnnnnnnnnnnnnnnnnnnnnnnnnnnnnnnnnnnnnnnnnnnnnnnnnnnnnnnnnnnnnnnnnnnnnnnnnnnnnnnnnnnnnnnnnnnnnnnnnnnnnnnnnnnnnnnnnnnnnnnnnnnnnnnnnnnnnnnnnnnnnnnnnnnnnnnnnnnnnnnnnnnnnnnnnnnnnnnnnnnnnnnnnnnnnnnnnnnnnnnnnnnnnnnnnnnnnnnnnnnnnnnnnnnnnnnnnnnnnnnnnnnnnnnnnnnnnnnnnnnnnnnnnnnnnnnnnnnnnnnnnnnnnnnnnnnnnnnnnnnnnnnnnnnnnnnnnnnnnnnnnnnnnnnnnnnnnnnnnnnnnnnnnnnnnnnnnnnnnnnnnnnnnnnnnnnnnnnnnnnnnnnnnnnnnnnnnnnnnnnnnnnnnnnnnnnnnnnnnnnnnnnnnnnnnnnnnnnnnnnnnnnnnnnnnnnnnnnnnnnnnnnnnnnnnnnnnnnnnnnnnnnnnnnnnnnnnnnnnnnnnnnnnnnnnnnnnnnnnnnnnnnnnnnnnnnnnnnnnnnnnnnnnnnnnnnnnnnnnnnnnnnnnnnnnnnnnnnnnnnnnnnnnnnnnnnnnnnnnnnnnnnnnnnnnnnnnnnnnnnnnnnnnnnnnnnnnnnnnnnnnnnnnnnnnnnnnnnnnnnnnnnnnnnnnnnnnnnnnnnnnnnnnnnnnnnnnnnnnnnnnnnnnnnnnnnnnnnnnnnnnnnnnnnnnnnnnnnnnnnnnnnnnnnnnnnnnnnnnnnnnnnnnnnnnnnnnnnnnnnnnnnnnnnnnnnnnnnnnnnnnnnnnnnnnnnnnnnnnnnnnnnnnnnnnnnnnnnnnnnnnnnnnnnnnnnnnnnnnnnnnnnnnnnnnnnnnnnnnnnnnnnnnnnnnnnnnnnnnnnnnnnnnnnnnnnnnnnnnnnnnnnnnnnnnnnnnnnnnnnnnnnnnnnnnnnnnnnnnnnnnnnnnnnnnnnnnnnnnnnnnnnnnnnnnnnnnnnnnnnnnnnnnnnnnnnnnnnnnnnnnnnnnnnnnnnnnnnnnnnnnnnnnnnnnnnnnnnnnnnnnnnnnnnnnnnnnnnnnnnnnnnnnnnnnnnnnnnnnnnnnnnnnnnnnnnnnnnnnnnnnnnnnnnnnnnnnnnnnnnnnnnnnnnnnnnnnnnnnnnnnnnnnnnnnnnnnnnnnnnnnnnnnnnnnnnnnnnnnnnnnnnnnnnnnnnnnnnnnnnnnnnnnnnnnnnnnnnnnnnnnnnnnnnnnnnnnnnnnnnnnnnnnnnnnnnnnnnnnnnnnnnnnnnnnnnnnnnnnnnnnnnnnnnnnnnnnnnnnnnnnnnnnnnnnnnnnnnnnnnnnnnnnnnnnnnnnnnnnnnnnnnnnnnnnnnnnnnnnnnnnnnnnnnnnnnnnnnnnnnnnnnnnnnnnnnnnnnnnnnnnnnnnnnnnnnnnnnnnnnnnnnnnnnnnnnnnnnnnnnnnnnnnnnnnnnnnnnnnnnnnnnnnnnnnnnnnnnnnnnnnnnnnnnnnnnnnnnnnnnnnnnnnnnnnnnnnnnnnnnnnnnnnnnnnnnnnnnnnnnnnnnnnnnnnnnnnnnnnnnnnnnnnnnnnnnnnnnnnnnnnnnnnnnnnnnnnnnnnnnnnnnnnnnnnnnnnnnnnnnnnnnnnnnnnnnnnnnnnnnnnnnnnnnnnnnnnnnnnnnnnnnnnnnnnnnnnnnnnnnnnnnnnnnnnnnnnnnnnnnnnnnnnnnnnnnnnnnnnnnnnnnnnnnnnnnnnnnnnnnnnnnnnnnnnnnnnnnnnnnnnnnnnnnnnnnnnnnnnnnnnnnnnnnnnnnnnnnnnnnnnnnnnnnnnnnnnnnnnnnnnnnnnnnnnnnnnnnnnnnnnnnnnnnnnnnnnnnnnnnnnnnnnnnnnnnnnnnnnnnnnnnnnnnnnnnnnnnnnnnnnnnnnnnnnnnnnnnnnnnnnnnnnnnnnnnnnnnnnnnnnnnnnnnnnnnnnnnnnnnnnnnnnnnnnnnnnnnnnnnnnnnnnnnnnnnnnnnnnnnnnnnnnnnnnnnnnnnnnnnnnnnnnnnnnnnnnnnnnnnnnnnnnnnnnnnnnnnnnnnnnnnnnnnnnnnnnnnnnnnnnnnnnnnnnnnnnnnnnnnnnnnnnnnnnnnnnnnnnnnnnnnnnnnnnnnnnnnnnnnnnnnnnnnnnnnnnnnnnnnnnnnnnnnnnnnnnnnnnnnnnnnnnnnnnnnnnnnnnnnnnnnnnnnnnnnnnnnnnnnnnnnnnnnnnnnnnnnnnnnnnnnnnnnnnnnnnnnnnnnnnnnnnnnnnnnnnnnnnnnnnnnnnnnnnnnnnnnnnnnnnnnnnnnnnnnnnnnnnnnnnnnnnnnnnnnnnnnnnnnnnnnnnnnnnnnnnnnnnnnnnnnnnnnnnnnnnnnnnnnnnnnnnnnnnnnnnnnnnnnnnnnnnnnnnnnnnnnnnnnnnnnnnnnnnnnnnnnnnnnnnnnnnnnnnnnnnnnnnnnnnnnnnnnnnnnnnnnnnnnnnnnnnnnnnnnnnnnnnnnnnnnnnnnnnnnnnnnnnnnnnnnnnnnnnnnnnnnnnnnnnnnnnnnnnnnnnnnnnnnnnnnnnnnnnnnnnnnnnnnnnnnnnnnnnnnnnnnnnnnnnnnnnnnnnnnnnnnnnnnnnnnnnnnnnnnnnnnnnnnnnnnnnnnnnnnnnnnnnnnnnnnnnnnnnnnnnnnnnnnnnnnnnnnnnnnnnnnnnnnnnnnnnnnnnnnnnnnnnnnnnnnnnnnnnnnnnnnnnnnnnnnnnnnnnnnnnnnnnnnnnnnnnnnnnnnnnnnnnnnnnnnnnnnnnnnnnnnnnnnnnnnnnnnnnnnnnnnnnnnnnnnnnnnnnnnnnnnnnnnnnnnnnnnnnnnnnnnnnnnnnnnnnnnnnnnnnnnnnnnnnnnnnnnnnnnnnnnnnnnnnnnnnnnnnnnnnnnnnnnnnnnnnnnnnnnnnnnnnnnnnnnnnnnnnnnnnnnnnnnnnnnnnnnnnnnnnnnnnnnnnnnnnnnnnnnnnnnnnnnnnnnnnnnnnnnnnnnnnnnnnnnnnnnnnnnnnnnnnnnnnnnnnnnnnnnnnnnnnnnnnnnnnnnnnnnnnnnnnnnnnnnnnnnnnnnnnnnnnnnnnnnnnnnnnnnnnnnnnnnnnnnnnnnnnnnnnnnnnnnnnnnnnnnnnnnnnnnnnnnnnnnnnnnnnnnnnnnnnnnnnnnnnnnnnnnnnnnnnnnnnnnnnnnnnnnnnnnnnnnnnnnnnnnnnnnnnnnnnnnnnnnnnnnnnnnnnnnnnnnnnnnnnnnnnnnnnnnnnnnnnnnnnnnnnnnnnnnnnnnnnnnnnnnnnnnnnnnnnnnnnnnnnnnnnnnnnnnnnnnnnnnnnnnnnnnnnnnnnnnnnnnnnnnnnnnnnnnnnnnnnnnnnnnnnnnnnnnnnnnnnnnnnnnnnnnnnnnnnnnnnnnnnnnnnnnnnnnnnnnnnnnnnnnnnnnnnnnnnnnnnnnnnnnnnnnnnnnnnnnnnnnnnnnnnnnnnnnnnnnnnnnnnnnnnnnnnnnnnnnnnnnnnnnnnnnnnnnnnnnnnnnnnnnnnnnnnnnnnnnnnnnnnnnnnnnnnnnnnnnnnnnnnnnnnnnnnnnnnnnnnnnnnnnnnnnnnnnnnnnnnnnnnnnnnnnnnnnnnnnnnnnnnnnnnnnnnnnnnnnnnnnnnnnnnnnnnnnnnnnnnnnnnnnnnnnnnnnnnnnnnnnnnnnnnnnnnnnnnnnnnnnnnnnnnnnnnnnnnnnnnnnnnnnnnnnnnnnnnnnnnnnnnnnnnnnnnnnnnnnnnnnnnnnnnnnnnnnnnnnnnnnnnnnnnnnnnnnnnnnnnnnnnnnnnnnnnnnnnnnnnnnnnnnnnnnnnnnnnnnnnnnnnnnnnnnnnnnnnnnnnnnnnnnnnnnnnnnnnnnnnnnnnnnnnnnnnnnnnnnnnnnnnnnnnnnnnnnnnnnnnnnnnnnnnnnnnnnnnnnnnnnnnnnnnnnnnnnnnnnnnnnnnnnnnnnnnnnnnnnnnnnnnnnnnnnnnnnnnnnnnnnnnnnnnnnnnnnnnnnnnnnnnnnnnnnnnnnnnnnnnnnnnnnnnnnnnnnnnnnnnnnnnnnnnnnnnnnnnnnnnnnnnnnnnnnnnnnnnnnnnnnnnnnnnnnnnnnnnnnnnnnnnnnnnnnnnnnnnnnnnnnnnnnnnnnnnnnnnnnnnnnnnnnnnnnnnnnnnnnnnnnnnnnnnnnnnnnnnnnnnnnnnnnnnnnnnnnnnnnnnnnnnnnnnnnnnnnnnnnnnnnnnnnnnnnnnnnnnnnnnnnnnnnnnnnnnnnnnnnnnnnnnnnnnnnnnnnnnnnnnnnnnnnnnnnnnnnnnnnnnnnnnnnnnnnnnnnnnnnnnnnnnnnnnnnnnnnnnnnnnnnnnnnnnnnnnnnnnnnnnnnnnnnnnnnnnnnnnnnnnnnnnnnnnnnnnnnnnnnnnnnnnnnnnnnnnnnnnnnnnnnnnnnnnnnnnnnnnnnnnnnnnnnnnnnnnnnnnnnnnnnnnnnnnnnnnnnnnnnnnnnnnnnnnnnnnnnnnnnnnnnnnnnnnnnnnnnnnnnnnnnnnnnnnnnnnnnnnnnnnnnnnnnnnnnnnnnnnnnnnnnnnnnnnnnnnnnnnnnnnnnnnnnnnnnnnnnnnnnnnnnnnnnnnnnnnnnnnnnnnnnnnnnnnnnnnnnnnnnnnnnnnnnnnnnnnnnnnnnnnnnnnnnnnnnnnnnnnnnnnnnnnnnnnnnnnnnnnnnnnnnnnnnnnnnnnnnnnnnnnnnnnnnnnnnnnnnnnnnnnnnnnnnnnnnnnnnnnnnnnnnnnnnnnnnnnnnnnnnnnnnnnnnnnnnnnnnnnnnnnnnnnnnnnnnnnnnnnnnnnnnnnnnnnnnnnnnnnnnnnnnnnnnnnnnnnnnnnnnnnnnnnnnnnnnnnnnnnnnnnnnnnnnnnnnnnnnnnnnnnnnnnnnnnnnnnnnnnnnnnnnnnnnnnnnnnnnnnnnnnnnnnnnnnnnnnnnnnnnnnnnnnnnnnnnnnnnnnnnnnnnnnnnnnnnnnnnnnnnnnnnnnnnnnnnnnnnnnnnnnnnnnnnnnnnnnnnnnnnnnnnnnnnnnnnnnnnnnnnnnnnnnnnnnnnnnnnnnnnnnnnnnnnnnnnnnnnnnnnnnnnnnnnnnnnnnnnnnnnnnnnnnnnnnnnnnnnnnnnnnnnnnnnnnnnnnnnnnnnnnnnnnnnnnnnnnnnnnnnnnnnnnnnnnnnnnnnnnnnnnnnnnnnnnnnnnnnnnnnnnnnnnnnnnnnnnnnnnnnnnnnnnnnnnnnnnnnnnnnnnnnnnnnnnnnnnnnnnnnnnnnnnnnnnnnnnnnnnnnnnnnnnnnnnnnnnnnnnnnnnnnnnnnnnnnnnnnnnnnnnnnnnnnnnnnnnnnnnnnnnnnnnnnnnnnnnnnnnnnnnnnnnnnnnnnnnnnnnnnnnnnnnnnnnnnnnnnnnnnnnnnnnnnnnnnnnnnnnnnnnnnnnnnnnnnnnnnnnnnnnnnnnnnnnnnnnnnnnnnnnnnnnnnnnnnnnnnnnnnnnnnnnnnnnnnnnnnnnnnnnnnnnnnnnnnnnnnnnnnnnnnnnnnnnnnnnnnnnnnnnnnnnnnnnnnnnnnnnnnnnnnnnnnnnnnnnnnnnnnnnnnnnnnnnnnnnnnnnnnnnnnnnnnnnnnnnnnnnnnnnnnnnnnnnnnnnnnnnnnnnnnnnnnnnnnnnnnnnnnnnnnnnnnnnnnnnnnnnnnnnnnnnnnnnnnnnnnnnnnnnnnnnnnnnnnnnnnnnnnnnnnnnnnnnnnnnnnnnnnnnnnnnnnnnnnnnnnnnnnnnnnnnnnnnnnnnnnnnnnnnnnnnnnnnnnnnnnnnnnnnnnnnnnnnnnnnnnnnnnnnnnnnnnnnnnnnnnnnnnnnnnnnnnnnnnnnnnnnnnnnnnnnnnnnnnnnnnnnnnnnnnnnnnnnnnnnnnnnnnnnnnnnnnnnnnnnnnnnnnnnnnnnnnnnnnnnnnnnnnnnnnnnnnnnnnnnnnnnnnnnnnnnnnnnnnnnnnnnnnnnnnnnnnnnnnnnnnnnnnnnnnnnnnnnnnnnnnnnnnnnnnnnnnnnnnnnnnnnnnnnnnnnnnnnnnnnnnnnnnnnnnnnnnnnnnnnnnnnnnnnnnnnnnnnnnnnnnnnnnnnnnnnnnnnnnnnnnnnnnnnnnnnnnnnnnnnnnnnnnnnnnnnnnnnnnnnnnnnnnnnnnnnnnnnnnnnnnnnnnnnnnnnnnnnnnnnnnnnnnnnnnnnnnnnnnnnnnnnnnnnnnnnnnnnnnnnnnnnnnnnnnnnnnnnnnnnnnnnnnnnnnnnnnnnnnnnnnnnnnnnnnnnnnnnnnnnnnnnnnnnnnnnnnnnnnnnnnnnnnnnnnnnnnnnnnnnnnnnnnnnnnnnnnnnnnnnnnnnnnnnnnnnnnnnnnnnnnnnnnnnnnnnnnnnnnnnnnnnnnnnnnnnnnnnnnnnnnnnnnnnnnnnnnnnnnnnnnnnnnnnnnnnnnnnnnnnnnnnnnnnnnnnnnnnnnnnnnnnnnnnnnnnnnnnnnnnnnnnnnnnnnnnnnnnnnnnnnnnnnnnnnnnnnnnnnnnnnnnnnnnnnnnnnnnnnnnnnnnnnnnnnnnnnnnnnnnnnnnnnnnnnnnnnnnnnnnnnnnnnnnnnnnnnnnnnnnnnnnnnnnnnnnnnnnnnnnnnnnnnnnnnnnnnnnnnnnnnnnnnnnnnnnnnnnnnnnnnnnnnnnnnnnnnnnnnnnnnnnnnnnnnnnnnnnnnnnnnnnnnnnnnnnnnnnnnnnnnnnnnnnnnnnnnnnnnnnnnnnnnnnnnnnnnnnnnnnnnnnnnnnnnnnnnnnnnnnnnnnnnnnnnnnnnnnnnnnnnnnnnnnnnnnnnnnnnnnnnnnnnnnnnnnnnnnnnnnnnnnnnnnnnnnnnnnnnnnnnnnnnnnnnnnnnnnnnnnnnnnnnnnnnnnnnnnnnnnnnnnnnnnnnnnnnnnnnnnnnnnnnnnnnnnnnnnnnnnnnnnnnnnnnnnnnnnnnnnnnnnnnnnnnnnnnnnnnnnnnnnnnnnnnnnnnnnnnnnnnnnnnnnnnnnnnnnnnnnnnnnnnnnnnnnnnnnnnnnnnnnnnnnnnnnnnnnnnnnnnnnnnnnnnnnnnnnnnnnnnnnnnnnnnnnnnnnnnnnnnnnnnnnnnnnnnnnnnnnnnnnnnnnnnnnnnnnnnnnnnnnnnnnnnnnnnnnnnnnnnnnnnnnnnnnnnnnnnnnnnnnnnnnnnnnnnnnnnnnnnnnnnnnnnnnnnnnnnnnnnnnnnnnnnnnnnnnnnnnnnnnnnnnnnnnnnnnnnnnnnnnnnnnnnnnnnnnnnnnnnnnnnnnnnnnnnnnnnnnnnnnnnnnnnnnnnnnnnnnnnnnnnnnnnnnnnnnnnnnnnnnnnnnnnnnnnnnnnnnnnnnnnnnnnnnnnnnnnnnnnnnnnnnnnnnnnnnnnnnnnnnnnnnnnnnnnnnnnnnnnnnnnnnnnnnnnnnnnnnnnnnnnnnnnnnnnnnnnnnnnnnnnnnnnnnnnnnnnnnnnnnnnnnnnnnnnnnnnnnnnnnnnnnnnnnnnnnnnnnnnnnnnnnnnnnnnnnnnnnnnnnnnnnnnnnnnnnnnnnnnnnnnnnnnnnnnnnnnnnnnnnnnnnnnnnnnnnnnnnnnnnnnnnnnnnnnnnnnnnnnnnnnnnnnnnnnnnnnnnnnnnnnnnnnnnnnnnnnnnnnnnnnnnnnnnnnnnnnnnnnnnnnnnnnnnnnnnnnnnnnnnnnnnnnnnnnnnnnnnnnnnnnnnnnnnnnnnnnnnnnnnnnnnnnnnnnnnnnnnnnnnnnnnnnnnnnnnnnnnnnnnnnnnnnnnnnnnnnnnnnnnnnnnnnnnnnnnnnnnnnnnnnnnnnnnnnnnnnnnnnnnnnnnnnnnnnnnnnnnnnnnnnnnnnnnnnnnnnnnnnnnnnnnnnnnnnnnnnnnnnnnnnnnnnnnnnnnnnnnnnnnnnnnnnnnnnnnnnnnnnnnnnnnnnnnnnnnnnnnnnnnnnnnnnnnnnnnnnnnnnnnnnnnnnnnnnnnnnnnnnnnnnnnnnnnnnnnnnnnnnnnnnnnnnnnnnnnnnnnnnnnnnnnnnnnnnnnnnnnnnnnnnnnnnnnnnnnnnnnnnnnnnnnnnnnnnnnnnnnnnnnnnnnnnnnnnnnnnnnnnnnnnnnnnnnnnnnnnnnnnnnnnnnnnnnnnnnnnnnnnnnnnnnnnnnnnnnnnnnnnnnnnnnnnnnnnnnnnnnnnnnnnnnnnnnnnnnnnnnnnnnnnnnnnnnnnnnnnnnnnnnnnnnnnnnnnnnnnnnnnnnnnnnnnnnnnnnnnnnnnnnnnnnnnnnnnnnnnnnnnnnnnnnnnnnnnnnnnnnnnnnnnnnnnnnnnnnnnnnnnnnnnnnnnnnnnnnnnnnnnnnnnnnnnnnnnnnnnnnnnnnnnnnnnnnnnnnnnnnnnnnnnnnnnnnnnnnnnnnnnnnnnnnnnnnnnnnnnnnnnnnnnnnnnnnnnnnnnnnnnnnnnnnnnnnnnnnnnnnnnnnnnnnnnnnnnnnnnnnnnnnnnnnnnnnnnnnnnnnnnnnnnnnnnnnnnnnnnnnnnnnnnnnnnnnnnnnnnnnnnnnnnnnnnnnnnnnnnnnnnnnnnnnnnnnnnnnnnnnnnnnnnnnnnnnnnnnnnnnnnnnnnnnnnnnnnnnnnnnnnnnnnnnnnnnnnnnnnnnnnnnnnnnnnnnnnnnnnnnnnnnnnnnnnnnnnnnnnnnnnnnnnnnnnnnnnnnnnnnnnnnnnnnnnnnnnnnnnnnnnnnnnnnnnnnnnnnnnnnnnnnnnnnnnnnnnnnnnnnnnnnnnnnnnnnnnnnnnnnnnnnnnnnnnnnnnnnnnnnnnnnnnnnnnnnnnnnnnnnnnnnnnnnnnnnnnnnnnnnnnnnnnnnnnnnnnnnnnnnnnnnnnnnnnnnnnnnnnnnnnnnnnnnnnnnnnnnnnnnnnnnnnnnnnnnnnnnnnnnnnnnnnnnnnnnnnnnnnnnnnnnnnnnnnnnnnnnnnnnnnnnnnnnnnnnnnnnnnnnnnnnnnnnnnnnnnnnnnnnnnnnnnnnnnnnnnnnnnnnnnnnnnnnnnnnnnnnnnnnnnnnnnnnnnnnnnnnnnnnnnnnnnnnnnnnnnnnnnnnnnnnnnnnnnnnnnnnnnnnnnnnnnnnnnnnnnnnnnnnnnnnnnnnnnnnnnnnnnnnnnnnnnnnnnnnnnnnnnnnnnnnnnnnnnnnnnnnnnnnnnnnnnnnnnnnnnnnnnnnnnnnnnnnnnnnnnnnnnnnnnnnnnnnnnnnnnnnnnnnnnnnnnnnnnnnnnnnnnnnnnnnnnnnnnnnnnnnnnnnnnnnnnnnnnnnnnnnnnnnnnnnnnnnnnnnnnnnnnnnnnnnnnnnnnnnnnnnnnnnnnnnnnnnnnnnnnnnnnnnnnnnnnnnnnnnnnnnnnnnnnnnnnnnnnnnnnnnnnnnnnnnnnnnnnnnnnnnnnnnnnnnnnnnnnnnnnnnnnnnnnnnnnnnnnnnnnnnnnnnnnnnnnnnnnnnnnnnnnnnnnnnnnnnnnnnnnnnnnnnnnnnnnnnnnnnnnnnnnnnnnnnnnnnnnnnnnnnnnnnnnnnnnnnnnnnnnnnnnnnnnnnnnnnnnnnnnnnnnnnnnnnnnnnnnnnnnnnnnnnnnnnnnnnnnnnnnnnnnnnnnnnnnnnnnnnnnnnnnnnnnnnnnnnnnnnnnnnnnnnnnnnnnnnnnnnnnnnnnnnnnnnnnnnnnnnnnnnnnnnnnnnnnnnnnnnnnnnnnnnnnnnnnnnnnnnnnnnnnnnnnnnnnnnnnnnnnnnnnnnnnnnnnnnnnnnnnnnnnnnnnnnnnnnnnnnnnnnnnnnnnnnnnnnnnnnnnnnnnnnnnnnnnnnnnnnnnnnnnnnnnnnnnnnnnnnnnnnnnnnnnnnnnnnnnnnnnnnnnnnnnnnnnnnnnnnnnnnnnnnnnnnnnnnnnnnnnnnnnnnnnnnnnnnnnnnnnnnnnnnnnnnnnnnnnnnnnnnnnnnnnnnnnnnnnnnnnnnnnnnnnnnnnnnnnnnnnnnnnnnnnnnnnnnnnnnnnnnnnnnnnnnnnnnnnnnnnnnnnnnnnnnnnnnnnnnnnnnnnnnnnnnnnnnnnnnnnnnnnnnnnnnnnnnnnnnnnnnnnnnnnnnnnnnnnnnnnnnnnnnnnnnnnnnnnnnnnnnnnnnnnnnnnnnnnnnnnnnnnnnnnnnnnnnnnnnnnnnnnnnnnnnnnnnnnnnnnnnnnnnnnnnnnnnnnnnnnnnnnnnnnnnnnnnnnnnnnnnnnnnnnnnnnnnnnnnnnnnnnnnnnnnnnnnnnnnnnnnnnnnnnnnnnnnnnnnnnnnnnnnnnnnnnnnnnnnnnnnnnnnnnnnnnnnnnnnnnnnnnnnnnnnnnnnnnnnnnnnnnnnnnnnnnnnnnnnnnnnnnnnnnnnnnnnnnnnnnnnnnnnnnnnnnnnnnnnnnnnnnnnnnnnnnnnnnnnnnnnnnnnnnnnnnnnnnnnnnnnnnnnnnnnnnnnnnnnnnnnnnnnnnnnnnnnnnnnnnnnnnnnnnnnnnnnnnnnnnnnnnnnnnnnnnnnnnnnnnnnnnnnnnnnnnnnnnnnnnnnnnnnnnnnnnnnnnnnnnnnnnnnnnnnnnnnnnnnnnnnnnnnnnnnnnnnnnnnnnnnnnnnnnnnnnnnnnnnnnnnnnnnnnnnnnnnnnnnnnnnnnnnnnnnnnnnnnnnnnnnnnnnnnnnnnnnnnnnnnnnnnnnnnnnnnnnnnnnnnnnnnnnnnnnnnnnnnnnnnnnnnnnnnnnnnnnnnnnnnnnnnnnnnnnnnnnnnnnnnnnnnnnnnnnnnnnnnnnnnnnnnnnnnnnnnnnnnnnnnnnnnnnnnnnnnnnnnnnnnnnnnnnnnnnnnnnnnnnnnnnnnnnnnnnnnnnnnnnnnnnnnnnnnnnnnnnnnnnnnnnnnnnnnnnnnnnnnnnnnnnnnnnnnnnnnnnnnnnnnnnnnnnnnnnnnnnnnnnnnnnnnnnnnnnnnnnnnnnnnnnnnnnnnnnnnnnnnnnnnnnnnnnnnnnnnnnnnnnnnnnnnnnnnnnnnnnnnnnnnnnnnnnnnnnnnnnnnnnnnnnnnnnnnnnnnnnnnnnnnnnnnnnnnnnnnnnnnnnnnnnnnnnnnnnnnnnnnnnnnnnnnnnnnnnnnnnnnnnnnnnnnnnnnnnnnnnnnnnnnnnnnnnnnnnnnnnnnnnnnnnnnnnnnnnnnnnnnnnnnnnnnnnnnnnnnnnnnnnnnnnnnnnnnnnnnnnnnnnnnnnnnnnnnnnnnnnnnnnnnnnnnnnnnnnnnnnnnnnnnnnnnnnnnnnnnnnnnnnnnnnnnnnnnnnnnnnnnnnnnnnnnnnnnnnnnnnnnnnnnnnnnnnnnnnnnnnnnnnnnnnnnnnnnnnnnnnnnnnnnnnnnnnnnnnnnnnnnnnnnnnnnnnnnnnnnnnnnnnnnnnnnnnnnnnnnnnnnnnnnnnnnnnnnnnnnnnnnnnnnnnnnnnnnnnnnnnnnnnnnnnnnnnnnnnnnnnnnnnnnnnnnnnnnnnnnnnnnnnnnnnnnnnnnnnnnnnnnnnnnnnnnnnnnnnnnnnnnnnnnnnnnnnnnnnnnnnnnnnnnnnnnnnnnnnnnnnnnnnnnnnnnnnnnnnnnnnnnnnnnnnnnnnnnnnnnnnnnnnnnnnnnnnnnnnnnnnnnnnnnnnnnnnnnnnnnnnnnnnnnnnnnnnnnnnnnnnnnnnnnnnnnnnnnnnnnnnnnnnnnnnnnnnnnnnnnnnnnnnnnnnnnnnnnnnnnnnnnnnnnnnnnnnnnnnnnnnnnnnnnnnnnnnnnnnnnnnnnnnnnnnnnnnnnnnnnnnnnnnnnnnnnnnnnnnnnnnnnnnnnnnnnnnnnnnnnnnnnnnnnnnnnnnnnnnnnnnnnnnnnnnnnnnnnnnnnnnnnnnnnnnnnnnnnnnnnnnnnnnnnnnnnnnnnnnnnnnnnnnnnnnnnnnnnnnnnnnnnnnnnnnnnnnnnnnnnnnnnnnnnnnnnnnnnnnnnnnnnnnnnnnnnnnnnnnnnnnnnnnnnnnnnnnnnnnnnnnnnnnnnnnnnnnnnnnnnnnnnnnnnnnnnnnnnnnnnnnnnnnnnnnnnnnnnnnnnnnnnnnnnnnnnnnnnnnnnnnnnnnnnnnnnnnnnnnnnnnnnnnnnnnnnnnnnnnnnnnnnnnnnnnnnnnnnnnnnnnnnnnnnnnnnnnnnnnnnnnnnnnnnnnnnnnnnnnnnnnnnnnnnnnnnnnnnnnnnnnnnnnnnnnnnnnnnnnnnnnnnnnnnnnnnnnnnnnnnnnnnnnnnnnnnnnnnnnnnnnnnnnnnnnnnnnnnnnnnnnnnnnnnnnnnnnnnnnnnnnnnnnnnnnnnnnnnnnnnnnnnnnnnnnnnnnnnnnnnnnnnnnnnnnnnnnnnnnnnnnnnnnnnnnnnnnnnnnnnnnnnnnnnnnnnnnnnnnnnnnnnnnnnnnnnnnnnnnnnnnnnnnnnnnnnnnnnnnnnnnnnnnnnnnnnnnnnnnnnnnnnnnnnnnnnnnnnnnnnnnnnnnnnnnnnnnnnnnnnnnnnnnnnnnnnnnnnnnnnnnnnnnnnnnnnnnnnnnnnnnnnnnnnnnnnnnnnnnnnnnnnnnnnnnnnnnnnnnnnnnnnnnnnnnnnnnnnnnnnnnnnnnnnnnnnnnnnnnnnnnnnnnnnnnnnnnnnnnnnnnnnnnnnnnnnnnnnnnnnnnnnnnnnnnnnnnnnnnnnnnnnnnnnnnnnnnnnnnnnnnnnnnnnnnnnnnnnnnnnnnnnnnnnnnnnnnnnnnnnnnnnnnnnnnnnnnnnnnnnnnnnnnnnnnnnnnnnnnnnnnnnnnnnnnnnnnnnnnnnnnnnnnnnnnnnnnnnnnnnnnnnnnnnnnnnnnnnnnnnnnnnnnnnnnnnnnnnnnnnnnnnnnnnnnnnnnnnnnnnnnnnnnnnnnnnnnnnnnnnnnnnnnnnnnnnnnnnnnnnnnnnnnnnnnnnnnnnnnnnnnnnnnnnnnnnnnnnnnnnnnnnnnnnnnnnnnnnnnnnnnnnnnnnnnnnnnnnnnnnnnnnnnnnnnnnnnnnnnnnnnnnnnnnnnnnnnnnnnnnnnnnnnnnnnnnnnnnnnnnnnnnnnnnnnnnnnnnnnnnnnnnnnnnnnnnnnnnnnnnnnnnnnnnnnnnnnnnnnnnnnnnnnnnnnnnnnnnnnnnnnnnnnnnnnnnnnnnnnnnnnnnnnnnnnnnnnnnnnnnnnnnnnnnnnnnnnnnnnnnnnnnnnnnnnnnnnnnnnnnnnnnnnnnnnnnnnnnnnnnnnnnnnnnnnnnnnnnnnnnnnnnnnnnnnnnnnnnnnnnnnnnnnnnnnnnnnnnnnnnnnnnnnnnnnnnnnnnnnnnnnnnnnnnnnnnnnnnnnnnnnnnnnnnnnnnnnnnnnnnnnnnnnnnnnnnnnnnnnnnnnnnnnnnnnnnnnnnnnnnnnnnnnnnnnnnnnnnnnnnnnnnnnnnnnnnnnnnnnnnnnnnnnnnnnnnnnnnnnnnnnnnnnnnnnnnnnnnnnnnnnnnnnnnnnnnnnnnnnnnnnnnnnnnnnnnnnnnnnnnnnnnnnnnnnnnnnnnnnnnnnnnnnnnnnnnnnnnnnnnnnnnnnnnnnnnnnnnnnnnnnnnnnnnnnnnnnnnnnnnnnnnnnnnnnnnnnnnnnnnnnnnnnnnnnnnnnnnnnnnnnnnnnnnnnnnnnnnnnnnnnnnnnnnnnnnnnnnnnnnnnnnnnnnnnnnnnnnnnnnnnnnnnnnnnnnnnnnnnnnnnnnnnnnnnnnnnnnnnnnnnnnnnnnnnnnnnnnnnnnnnnnnnnnnnnnnnnnnnnnnnnnnnnnnnnnnnnnnnnnnnnnnnnnnnnnnnnnnnnnnnnnnnnnnnnnnnnnnnnnnnnnnnnnnnnnnnnnnnnnnnnnnnnnnnnnnnnnnnnnnnnnnnnnnnnnnnnnnnnnnnnnnnnnnnnnnnnnnnnnnnnnnnnnnnnnnnnnnnnnnnnnnnnnnnnnnnnnnnnnnnnnnnnnnnnnnnnnnnnnnnnnnnnnnnnnnnnnnnnnnnnnnnnnnnnnnnnnnnnnnnnnnnnnnnnnnnnnnnnnnnnnnnnnnnnnnnnnnnnnnnnnnnnnnnnnnnnnnnnnnnnnnnnnnnnnnnnnnnnnnnnnnnnnnnnnnnnnnnnnnnnnnnnnnnnnnnnnnnnnnnnnnnnnnnnnnnnnnnnnnnnnnnnnnnnnnnnnnnnnnnnnnnnnnnnnnnnnnnnnnnnnnnnnnnnnnnnnnnnnnnnnnnnnnnnnnnnnnnnnnnnnnnnnnnnnnnnnnnnnnnnnnnnnnnnnnnnnnnnnnnnnnnnnnnnnnnnnnnnnnnnnnnnnnnnnnnnnnnnnnnnnnnnnnnnnnnnnnnnnnnnnnnnnnnnnnnnnnnnnnnnnnnnnnnnnnnnnnnnnnnnnnnnnnnnnnnnnnnnnnnnnnnnnnnnnnnnnnnnnnnnnnnnnnnnnnnnnnnnnnnnnnnnnnnnnnnnnnnnnnnnnnnnnnnnnnnnnnnnnnnnnnnnnnnnnnnnnnnnnnnnnnnnnnnnnnnnnnnnnnnnnnnnnnnnnnnnnnnnnnnnnnnnnnnnnnnnnnnnnnnnnnnnnnnnnnnnnnnnnnnnnnnnnnnnnnnnnnnnnnnnnnnnnnnnnnnnnnnnnnnnnnnnnnnnnnnnnnnnnnnnnnnnnnnnnnnnnnnnnnnnnnnnnnnnnnnnnnnnnnnnnnnnnnnnnnnnnnnnnnnnnnnnnnnnnnnnnnnnnnnnnnnnnnnnnnnnnnnnnnnnnnnnnnnnnnnnnnnnnnnnnnnnnnnnnnnnnnnnnnnnnnnnnnnnnnnnnnnnnnnnnnnnnnnnnnnnnnnnnnnnnnnnnnnnnnnnnnnnnnnnnnnnnnnnnnnnnnnnnnnnnnnnnnnnnnnnnnnnnnnnnnnnnnnnnnnnnnnnnnnnnnnnnnnnnnnnnnnnnnnnnnnnnnnnnnnnnnnnnnnnnnnnnnnnnnnnnnnnnnnnnnnnnnnnnnnnnnnnnnnnnnnnnnnnnnnnnnnnnnnnnnnnnnnnnnnnnnnnnnnnnnnnnnnnnnnnnnnnnnnnnnnnnnnnnnnnnnnnnnnnnnnnnnnnnnnnnnnnnnnnnnnnnnnnnnnnnnnnnnnnnnnnnnnnnnnnnnnnnnnnnnnnnnnnnnnnnnnnnnnnnnnnnnnnnnnnnnnnnnnnnnnnnnnnnnnnnnnnnnnnnnnnnnnnnnnnnnnnnnnnnnnnnnnnnnnnnnnnnnnnnnnnnnnnnnnnnnnnnnnnnnnnnnnnnnnnnnnnnnnnnnnnnnnnnnnnnnnnnnnnnnnnnnnnnnnnnnnnnnnnnnnnnnnnnnnnnnnnnnnnnnnnnnnnnnnnnnnnnnnnnnnnnnnnnnnnnnnnnnnnnnnnnnnnnnnnnnnnnnnnnnnnnnnnnnnnnnnnnnnnnnnnnnnnnnnnnnnnnnnnnnnnnnnnnnnnnnnnnnnnnnnnnnnnnnnnnnnnnnnnnnnnnnnnnnnnnnnnnnnnnnnnnnnnnnnnnnnnnnnnnnnnnnnnnnnnnnnnnnnnnnnnnnnnnnnnnnnnnnnnnnnnnnnnnnnnnnnnnnnnnnnnnnnnnnnnnnnnnnnnnnnnnnnnnnnnnnnnnnnnnnnnnnnnnnnnnnnnnnnnnnnnnnnnnnnnnnnnnnnnnnnnnnnnnnnnnnnnnnnnnnnnnnnnnnnnnnnnnnnnnnnnnnnnnnnnnnnnnnnnnnnnnnnnnnnnnnnnnnnnnnnnnnnnnnnnnnnnnnnnnnnnnnnnnnnnnnnnnnnnnnnnnnnnnnnnnnnnnnnnnnnnnnnnnnnnnnnnnnnnnnnnnnnnnnnnnnnnnnnnnnnnnnnnnnnnnnnnnnnnnnnnnnnnnnnnnnnnnnnnnnnnnnnnnnnnnnnnnnnnnnnnnnnnnnnnnnnnnnnnnnnnnnnnnnnnnnnnnnnnnnnnnnnnnnnnnnnnnnnnnnnnnnnnnnnnnnnnnnnnnnnnnnnnnnnnnnnnnnnnnnnnnnnnnnnnnnnnnnnnnnnnnnnnnnnnnnnnnnnnnnnnnnnnnnnnnnnnnnnnnnnnnnnnnnnnnnnnnnnnnnnnnnnnnnnnnnnnnnnnnnnnnnnnnnnnnnnnnnnnnnnnnnnnnnnnnnnnnnnnnnnnnnnnnnnnnnnnnnnnnnnnnnnnnnnnnnnnnnnnnnnnnnnnnnnnnnnnnnnnnnnnnnnnnnnnnnnnnnnnnnnnnnnnnnnnnnnnnnnnnnnnnnnnnnnnnnnnnnnnnnnnnnnnnnnnnnnnnnnnnnnnnnnnnnnnnnnnnnnnnnnnnnnnnnnnnnnnnnnnnnnnnnnnnnnnnnnnnnnnnnnnnnnnnnnnnnnnnnnnnnnnnnnnnnnnnnnnnnnnnnnnnnnnnnnnnnnnnnnnnnnnnnnnnnnnnnnnnnnnnnnnnnnnnnnnnnnnnnnnnnnnnnnnnnnnnnnnnnnnnnnnnnnnnnnnnnnnnnnnnnnnnnnnnnnnnnnnnnnnnnnnnnnnnnnnnnnnnnnnnnnnnnnnnnnnnnnnnnnnnnnnnnnnnnnnnnnnnnnnnnnnnnnnnnnnnnnnnnnnnnnnnnnnnnnnnnnnnnnnnnnnnnnnnnnnnnnnnnnnnnnnnnnnnnnnnnnnnnnnnnnnnnnnnnnnnnnnnnnnnnnnnnnnnnnnnnnnnnnnnnnnnnnnnnnnnnnnnnnnnnnnnnnnnnnnnnnnnnnnnnnnnnnnnnnnnnnnnnnnnnnnnnnnnnnnnnnnnnnnnnnnnnnnnnnnnnnnnnnnnnnnnnnnnnnnnnnnnnnnnnnnnnnnnnnnnnnnnnnnnnnnnnnnnnnnnnnnnnnnnnnnnnnnnnnnnnnnnnnnnnnnnnnnnnnnnnnnnnnnnnnnnnnnnnnnnnnnnnnnnnnnnnnnnnnnnnnnnnnnnnnnnnnnnnnnnnnnnnnnnnnnnnnnnnnnnnnnnnnnnnnnnnnnnnnnnnnnnnnnnnnnnnnnnnnnnnnnnnnnnnnnnnnnnnnnnnnnnnnnnnnnnnnnnnnnnnnnnnnnnnnnnnnnnnnnnnnnnnnnnnnnnnnnnnnnnnnnnnnnnnnnnnnnnnnnnnnnnnnnnnnnnnnnnnnnnnnnnnnnnnnnnnnnnnnnnnnnnnnnnnnnnnnnnnnnnnnnnnnnnnnnnnnnnnnnnnnnnnnnnnnnnnnnnnnnnnnnnnnnnnnnnnnnnnnnnnnnnnnnnnnnnnnnnnnnnnnnnnnnnnnnnnnnnnnnnnnnnnnnnnnnnnnnnnnnnnnnnnnnnnnnnnnnnnnnnnnnnnnnnnnnnnnnnnnnnnnnnnnnnnnnnnnnnnnnnnnnnnnnnnnnnnnnnnnnnnnnnnnnnnnnnnnnnnnnnnnnnnnnnnnnnnnnnnnnnnnnnnnnnnnnnnnnnnnnnnnnnnnnnnnnnnnnnnnnnnnnnnnnnnnnnnnnnnnnnnnnnnnnnnnnnnnnnnnnnnnnnnnnnnnnnnnnnnnnnnnnnnnnnnnnnnnnnnnnnnnnnnnnnnnnnnnnnnnnnnnnnnnnnnnnnnnnnnnnnnnnnnnnnnnnnnnnnnnnnnnnnnnnnnnnnnnnnnnnnnnnnnnnnnnnnnnnnnnnnnnnnnnnnnnnnnnnnnnnnnnnnnnnnnnnnnnnnnnnnnnnnnnnnnnnnnnnnnnnnnnnnnnnnnnnnnnnnnnnnnnnnnnnnnnnnnnnnnnnnnnnnnnnnnnnnnnnnnnnnnnnnnnnnnnnnnnnnnnnnnnnnnnnnnnnnnnnnnnnnnnnnnnnnnnnnnnnnnnnnnnnnnnnnnnnnnnnnnnnnnnnnnnnnnnnnnnnnnnnnnnnnnnnnnnnnnnnnnnnnnnnnnnnnnnnnnnnnnnnnnnnnnnnnnnnnnnnnnnnnnnnnnnnnnnnnnnnnnnnnnnnnnnnnnnnnnnnnnnnnnnnnnnnnnnnnnnnnnnnnnnnnnnnnnnnnnnnnnnnnnnnnnnnnnnnnnnnnnnnnnnnnnnnnnnnnnnnnnnnnnnnnnnnnnnnnnnnnnnnnnnnnnnnnnnnnnnnnnnnnnnnnnnnnnnnnnnnnnnnnnnnnnnnnnnnnnnnnnnnnnnnnnnnnnnnnnnnnnnnnnnnnnnnnnnnnnnnnnnnnnnnnnnnnnnnnnnnnnnnnnnnnnnnnnnnnnnnnnnnnnnnnnnnnnnnnnnnnnnnnnnnnnnnnnnnnnnnnnnnnnnnnnnnnnnnnnnnnnnnnnnnnnnnnnnnnnnnnnnnnnnnnnnnnnnnnnnnnnnnnnnnnnnnnnnnnnnnnnnnnnnnnnnnnnnnnnnnnnnnnnnnnnnnnnnnnnnnnnnnnnnnnnnnnnnnnnnnnnnnnnnnnnnnnnnnnnnnnnnnnnnnnnnnnnnnnnnnnnnnnnnnnnnnnnnnnnnnnnnnnnnnnnnnnnnnnnnnnnnnnnnnnnnnnnnnnnnnnnnnnnnnnnnnnnnnnnnnnnnnnnnnnnnnnnnnnnnnnnnnnnnnnnnnnnnnnnnnnnnnnnnnnnnnnnnnnnnnnnnnnnnnnnnnnnnnnnnnnnnnnnnnnnnnnnnnnnnnnnnnnnnnnnnnnnnnnnnnnnnnnnnnnnnnnnnnnnnnnnnnnnnnnnnnnnnnnnnnnnnnnnnnnnnnnnnnnnnnnnnnnnnnnnnnnnnnnnnnnnnnnnnnnnnnnnnnnnnnnnnnnnnnnnnnnnnnnnnnnnnnnnnnnnnnnnnnnnnnnnnnnnnnnnnnnnnnnnnnnnnnnnnnnnnnnnnnnnnnnnnnnnnnnnnnnnnnnnnnnnnnnnnnnnnnnnnnnnnnnnnnnnnnnnnnnnnnnnnnnnnnnnnnnnnnnnnnnnnnnnnnnnnnnnnnnnnnnnnnnnnnnnnnnnnnnnnnnnnnnnnnnnnnnnnnnnnnnnnnnnnnnnnnnnnnnnnnnnnnnnnnnnnnnnnnnnnnnnnnnnnnnnnnnnnnnnnnnnnnnnnnnnnnnnnnnnnnnnnnnnnnnnnnnnnnnnnnnnnnnnnnnnnnnnnnnnnnnnnnnnnnnnnnnnnnnnnnnnnnnnnnnnnnnnnnnnnnnnnnnnnnnnnnnnnnnnnnnnnnnnnnnnnnnnnnnnnnnnnnnnnnnnnnnnnnnnnnnnnnnnnnnnnnnnnnnnnnnnnnnnnnnnnnnnnnnnnnnnnnnnnnnnnnnnnnnnnnnnnnnnnnnnnnnnnnnnnnnnnnnnnnnnnnnnnnnnnnnnnnnnnnnnnnnnnnnnnnnnnnnnnnnnnnnnnnnnnnnnnnnnnnnnnnnnnnnnnnnnnnnnnnnnnnnnnnnnnnnnnnnnnnnnnnnnnnnnnnnnnnnnnnnnnnnnnnnnnnnnnnnnnnnnnnnnnnnnnnnnnnnnnnnnnnnnnnnnnnnnnnnnnnnnnnnnnnnnnnnnnnnnnnnnnnnnnnnnnnnnnnnnnnnnnnnnnnnnnnnnnnnnnnnnnnnnnnnnnnnnnnnnnnnnnnnnnnnnnnnnnnnnnnnnnnnnnnnnnnnnnnnnnnnnnnnnnnnnnnnnnnnnnnnnnnnnnnnnnnnnnnnnnnnnnnnnnnnnnnnnnnnnnnnnnnnnnnnnnnnnnnnnnnnnnnnnnnnnnnnnnnnnnnnnnnnnnnnnnnnnnnnnnnnnnnnnnnnnnnnnnnnnnnnnnnnnnnnnnnnnnnnnnnnnnnnnnnnnnnnnnnnnnnnnnnnnnnnnnnnnnnnnnnnnnnnnnnnnnnnnnnnnnnnnnnnnnnnnnnnnnnnnnnnnnnnnnnnnnnnnnnnnnnnnnnnnnnnnnnnnnnnnnnnnnnnnnnnnnnnnnnnnnnnnnnnnnnnnnnnnnnnnnnnnnnnnnnnnnnnnnnnnnnnnnnnnnnnnnnnnnnnnnnnnnnnnnnnnnnnnnnnnnnnnnnnnnnnnnnnnnnnnnnnnnnnnnnnnnnnnnnnnnnnnnnnnnnnnnnnnnnnnnnnnnnnnnnnnnnnnnnnnnnnnnnnnnnnnnnnnnnnnnnnnnnnnnnnnnnnnnnnnnnnnnnnnnnnnnnnnnnnnnnnnnnnnnnnnnnnnnnnnnnnnnnnnnnnnnnnnnnnnnnnnnnnnnnnnnnnnnnnnnnnnnnnnnnnnnnnnnnnnnnnnnnnnnnnnnnnnnnnnnnnnnnnnnnnnnnnnnnnnnnnnnnnnnnnnnnnnnnnnnnnnnnnnnnnnnnnnnnnnnnnnnnnnnnnnnnnnnnnnnnnnnnnnnnnnnnnnnnnnnnnnnnnnnnnnnnnnnnnnnnnnnnnnnnnnnnnnnnnnnnnnnnnnnnnnnnnnnnnnnnnnnnnnnnnnnnnnnnnnnnnnnnnnnnnnnnnnnnnnnnnnnnnnnnnnnnnnnnnnnnnnnnnnnnnnnnnnnnnnnnnnnnnnnnnnnnnnnnnnnnnnnnnnnnnnnnnnnnnnnnnnnnnnnnnnnnnnnnnnnnnnnnnnnnnnnnnnnnnnnnnnnnnnnnnnnnnnnnnnnnnnnnnnnnnnnnnnnnnnnnnnnnnnnnnnnnnnnnnnnnnnnnnnnnnnnnnnnnnnnnnnnnnnnnnnnnnnnnnnnnnnnnnnnnnnnnnnnnnnnnnnnnnnnnnnnnnnnnnnnnnnnnnnnnnnnnnnnnnnnnnnnnnnnnnnnnnnnnnnnnnnnnnnnnnnnnnnnnnnnnnnnnnnnnnnnnnnnnnnnnnnnnnnnnnnnnnnnnnnnnnnnnnnnnnnnnnnnnnnnnnnnnnnnnnnnnnnnnnnnnnnnnnnnnnnnnnnnnnnnnnnnnnnnnnnnnnnnnnnnnnnnnnnnnnnnnnnnnnnnnnnnnnnnnnnnnnnnnnnnnnnnnnnnnnnnnnnnnnnnnnnnnnnnnnnnnnnnnnnnnnnnnnnnnnnnnnnnnnnnnnnnnnnnnnnnnnnnnnnnnnnnnnnnnnnnnnnnnnnnnnnnnnnnnnnnnnnnnnnnnnnnnnnnnnnnnnnnnnnnnnnnnnnnnnnnnnnnnnnnnnnnnnnnnnnnnnnnnnnnnnnnnnnnnnnnnnnnnnnnnnnnnnnnnnnnnnnnnnnnnnnnnnnnnnnnnnnnnnnnnnnnnnnnnnnnnnnnnnnnnnnnnnnnnnnnnnnnnnnnnnnnnnnnnnnnnnnnnnnnnnnnnnnnnnnnnnnnnnnnnnnnnnnnnnnnnnnnnnnnnnnnnnnnnnnnnnnnnnnnnnnnnnnnnnnnnnnnnnnnnnnnnnnnnnnnnnnnnnnnnnnnnnnnnnnnnnnnnnnnnnnnnnnnnnnnnnnnnnnnnnnnnnnnnnnnnnnnnnnnnnnnnnnnnnnnnnnnnnnnnnnnnnnnnnnnnnnnnnnnnnnnnnnnnnnnnnnnnnnnnnnnnnnnnnnnnnnnnnnnnnnnnnnnnnnnnnnnnnnnnnnnnnnnnnnnnnnnnnnnnnnnnnnnnnnnnnnnnnnnnnnnnnnnnnnnnnnnnnnnnnnnnnnnnnnnnnnnnnnnnnnnnnnnnnnnnnnnnnnnnnnnnnnnnnnnnnnnnnnnnnnnnnnnnnnnnnnnnnnnnnnnnnnnnnnnnnnnnnnnnnnnnnnnnnnnnnnnnnnnnnnnnnnnnnnnnnnnnnnnnnnnnnnnnnnnnnnnnnnnnnnnnnnnnnnnnnnnnnnnnnnnnnnnnnnnnnnnnnnnnnnnnnnnnnnnnnnnnnnnnnnnnnnnnnnnnnnnnnnnnnnnnnnnnnnnnnnnnnnnnnnnnnnnnnnnnnnnnnnnnnnnnnnnnnnnnnnnnnnnnnnnnnnnnnnnnnnnnnnnnnnnnnnnnnnnnnnnnnnnnnnnnnnnnnnnnnnnnnnnnnnnnnnnnnnnnnnnnnnnnnnnnnnnnnnnnnnnnnnnnnnnnnnnnnnnnnnnnnnnnnnnnnnnnnnnnnnnnnnnnnnnnnnnnnnnnnnnnnnnnnnnnnnnnnnnnnnnnnnnnnnnnnnnnnnnnnnnnnnnnnnnnnnnnnnnnnnnnnnnnnnnnnnnnnnnnnnnnnnnnnnnnnnnnnnnnnnnnnnnnnnnnnnnnnnnnnnnnnnnnnnnnnnnnnnnnnnnnnnnnnnnnnnnnnnnnnnnnnnnnnnnnnnnnnnnnnnnnnnnnnnnnnnnnnnnnnnnnnnnnnnnnnnnnnnnnnnnnnnnnnnnnnnnnnnnnnnnnnnnnnnnnnnnnnnnnnnnnnnnnnnnnnnnnnnnnnnnnnnnnnnnnnnnnnnnnnnnnnnnnnnnnnnnnnnnnnnnnnnnnnnnnnnnnnnnnnnnnnnnnnnnnnnnnnnnnnnnnnnnnnnnnnnnnnnnnnnnnnnnnnnnnnnnnnnnnnnnnnnnnnnnnnnnnnnnnnnnnnnnnnnnnnnnnnnnnnnnnnnnnnnnnnnnnnnnnnnnnnnnnnnnnnnnnnnnnnnnnnnnnnnnnnnnnnnnnnnnnnnnnnnnnnnnnnnnnnnnnnnnnnnnnnnnnnnnnnnnnnnnnnnnnnnnnnnnnnnnnnnnnnnnnnnnnnnnnnnnnnnnnnnnnnnnnnnnnnnnnnnnnnnnnnnnnnnnnnnnnnnnnnnnnnnnnnnnnnnnnnnnnnnnnnnnnnnnnnnnnnnnnnnnnnnnnnnnnnnnnnnnnnnnnnnnnnnnnnnnnnnnnnnnnnnnnnnnnnnnnnnnnnnnnnnnnnnnnnnnnnnnnnnnnnnnnnnnnnnnnnnnnnnnnnnnnnnnnnnnnnnnnnnnnnnnnnnnnnnnnnnnnnnnnnnnnnnnnnnnnnnnnnnnnnnnnnnnnnnnnnnnnnnnnnnnnnnnnnnnnnnnnnnnnnnnnnnnnnnnnnnnnnnnnnnnnnnnnnnnnnnnnnnnnnnnnnnnnnnnnnnnnnnnnnnnnnnnnnnnnnnnnnnnnnnnnnnnnnnnnnnnnnnnnnnnnnnnnnnnnnnnnnnnnnnnnnnnnnnnnnnnnnnnnnnnnnnnnnnnnnnnnnnnnnnnnnnnnnnnnnnnnnnnnnnnnnnnnnnnnnnnnnnnnnnnnnnnnnnnnnnnnnnnnnnnnnnnnnnnnnnnnnnnnnnnnnnnnnnnnnnnnnnnnnnnnnnnnnnnnnnnnnnnnnnnnnnnnnnnnnnnnnnnnnnnnnnnnnnnnnnnnnnnnnnnnnnnnnnnnnnnnnnnnnnnnnnnnnnnnnnnnnnnnnnnnnnnnnnnnnnnnnnnnnnnnnnnnnnnnnnnnnnnnnnnnnnnnnnnnnnnnnnnnnnnnnnnnnnnnnnnnnnnnnnnnnnnnnnnnnnnnnnnnnnnnnnnnnnnnnnnnnnnnnnnnnnnnnnnnnnnnnnnnnnnnnnnnnnnnnnnnnnnnnnnnnnnnnnnnnnnnnnnnnnnnnnnnnnnnnnnnnnnnnnnnnnnnnnnnnnnnnnnnnnnnnnnnnnnnnnnnnnnnnnnnnnnnnnnnnnnnnnnnnnnnnnnnnnnnnnnnnnnnnnnnnnnnnnnnnnnnnnnnnnnnnnnnnnnnnnnnnnnnnnnnnnnnnnnnnnnnnnnnnnnnnnnnnnnnnnnnnnnnnnnnnnnnnnnnnnnnnnnnnnnnnnnnnnnnnnnnnnnnnnnnnnnnnnnnnnnnnnnnnnnnnnnnnnnnnnnnnnnnnnnnnnnnnnnnnnnnnnnnnnnnnnnnnnnnnnnnnnnnnnnnnnnnnnnnnnnnnnnnnnnnnnnnnnnnnnnnnnnnnnnnnnnnnnnnnnnnnnnnnnnnnnnnnnnnnnnnnnnnnnnnnnnnnnnnnnnnnnnnnnnnnnnnnnnnnnnnnnnnnnnnnnnnnnnnnnnnnnnnnnnnnnnnnnnnnnnnnnnnnnnnnnnnnnnnnnnnnnnnnnnnnnnnnnnnnnnnnnnnnnnnnnnnnnnnnnnnnnnnnnnnnnnnnnnnnnnnnnnnnnnnnnnnnnnnnnnnnnnnnnnnnnnnnnnnnnnnnnnnnnnnnnnnnnnnnnnnnnnnnnnnnnnnnnnnnnnnnnnnnnnnnnnnnnnnnnnnnnnnnnnnnnnnnnnnnnnnnnnnnnnnnnnnnnnnnnnnnnnnnnnnnnnnnnnnnnnnnnnnnnnnnnnnnnnnnnnnnnnnnnnnnnnnnnnnnnnnnnnnnnnnnnnnnnnnnnnnnnnnnnnnnnnnnnnnnnnnnnnnnnnnnnnnnnnnnnnnnnnnnnnnnnnnnnnnnnnnnnnnnnnnnnnnnnnnnnnnnnnnnnnnnnnnnnnnnnnnnnnnnnnnnnnnnnnnnnnnnnnnnnnnnnnnnnnnnnnnnnnnnnnnnnnnnnnnnnnnnnnnnnnnnnnnnnnnnnnnnnnnnnnnnnnnnnnnnnnnnnnnnnnnnnnnnnnnnnnnnnnnnnnnnnnnnnnnnnnnnnnnnnnnnnnnnnnnnnnnnnnnnnnnnnnnnnnnnnnnnnnnnnnnnnnnnnnnnnnnnnnnnnnnnnnnnnnnnnnnnnnnnnnnnnnnnnnnnnnnnnnnnnnnnnnnnnnnnnnnnnnnnnnnnnnnnnnnnnnnnnnnnnnnnnnnnnnnnnnnnnnnnnnnnnnnnnnnnnnnnnnnnnnnnnnnnnnnnnnnnnnnnnnnnnnnnnnnnnnnnnnnnnnnnnnnnnnnnnnnnnnnnnnnnnnnnnnnnnnnnnnnnnnnnnnnnnnnnnnnnnnnnnnnnnnnnnnnnnnnnnnnnnnnnnnnnnnnnnnnnnnnnnnnnnnnnnnnnnnnnnnnnnnnnnnnnnnnnnnnnnnnnnnnnnnnnnnnnnnnnnnnnnnnnnnnnnnnnnnnnnnnnnnnnnnnnnnnnnnnnnnnnnnnnnnnnnnnnnnnnnnnnnnnnnnnnnnnnnnnnnnnnnnnnnnnnnnnnnnnnnnnnnnnnnnnnnnnnnnnnnnnnnnnnnnnnnnnnnnnnnnnnnnnnnnnnnnnnnnnnnnnnnnnnnnnnnnnnnnnnnnnnnnnnnnnnnnnnnnnnnnnnnnnnnnnnnnnnnnnnnnnnnnnnnnnnnnnnnnnnnnnnnnnnnnnnnnnnnnnnnnnnnnnnnnnnnnnnnnnnnnnnnnnnnnnnnnnnnnnnnnnnnnnnnnnnnnnnnnnnnnnnnnnnnnnnnnnnnnnnnnnnnnnnnnnnnnnnnnnnnnnnnnnnnnnnnnnnnnnnnnnnnnnnnnnnnnnnnnnnnnnnnnnnnnnnnnnnnnnnnnnnnnnnnnnnnnnnnnnnnnnnnnnnnnnnnnnnnnnnnnnnnnnnnnnnnnnnnnnnnnnnnnnnnnnnnnnnnnnnnnnnnnnnnnnnnnnnnnnnnnnnnnnnnnnnnnnnnnnnnnnnnnnnnnnnnnnnnnnnnnnnnnnnnnnnnnnnnnnnnnnnnnnnnnnnnnnnnnnnnnnnnnnnnnnnnnnnnnnnnnnnnnnnnnnnnnnnnnnnnnnnnnnnnnnnnnnnnnnnnnnnnnnnnnnnnnnnnnnnnnnnnnnnnnnnnnnnnnnnnnnnnnnnnnnnnnnnnnnnnnnnnnnnnnnnnnnnnnnnnnnnnnnnnnnnnnnnnnnnnnnnnnnnnnnnnnnnnnnnnnnnnnnnnnnnnnnnnnnnnnnnnnnnnnnnnnnnnnnnnnnnnnnnnnnnnnnnnnnnnnnnnnnnnnnnnnnnnnnnnnnnnnnnnnnnnnnnnnnnnnnnnnnnnnnnnnnnnnnnnnnnnnnnnnnnnnnnnnnnnnnnnnnnnnnnnnnnnnnnnnnnnnnnnnnnnnnnnnnnnnnnnnnnnnnnnnnnnnnnnnnnnnnnnnnnnnnnnnnnnnnnnnnnnnnnnnnnnnnnnnnnnnnnnnnnnnnnnnnnnnnnnnnnnnnnnnnnnnnnnnnnnnnnnnnnnnnnnnnnnnnnnnnnnnnnnnnnnnnnnnnnnnnnnnnnnnnnnnnnnnnnnnnnnnnnnnnnnnnnnnnnnnnnnnnnnnnnnnnnnnnnnnnnnnnnnnnnnnnnnnnnnnnnnnnnnnnnnnnnnnnnnnnnnnnnnnnnnnnnnnnnnnnnnnnnnnnnnnnnnnnnnnnnnnnnnnnnnnnnnnnnnnnnnnnnnnnnnnnnnnnnnnnnnnnnnnnnnnnnnnnnnnnnnnnnnnnnnnnnnnnnnnnnnnnnnnnnnnnnnnnnnnnnnnnnnnnnnnnnnnnnnnnnnnnnnnnnnnnnnnnnnnnnnnnnnnnnnnnnnnnnnnnnnnnnnnnnnnnnnnnnnnnnnnnnnnnnnnnnnnnnnnnnnnnnnnnnnnnnnnnnnnnnnnnnnnnnnnnnnnnnnnnnnnnnnnnnnnnnnnnnnnnnnnnnnnnnnnnnnnnnnnnnnnnnnnnnnnnnnnnnnnnnnnnnnnnnnnnnnnnnnnnnnnnnnnnnnnnnnnnnnnnnnnnnnnnnnnnnnnnnnnnnnnnnnnnnnnnnnnnnnnnnnnnnnnnnnnnnnnnnnnnnnnnnnnnnnnnnnnnnnnnnnnnnnnnnnnnnnnnnnnnnnnnnnnnnnnnnnnnnnnnnnnnnnnnnnnnnnnnnnnnnnnnnnnnnnnnnnnnnnnnnnnnnnnnnnnnnnnnnnnnnnnnnnnnnnnnnnnnnnnnnnnnnnnnnnnnnnnnnnnnnnnnnnnnnnnnnnnnnnnnnnnnnnnnnnnnnnnnnnnnnnnnnnnnnnnnnnnnnnnnnnnnnnnnnnnnnnnnnnnnnnnnnnnnnnnnnnnnnnnnnnnnnnnnnnnnnnnnnnnnnnnnnnnnnnnnnnnnnnnnnnnnnnnnnnnnnnnnnnnnnnnnnnnnnnnnnnnnnnnnnnnnnnnnnnnnnnnnnnnnnnnnnnnnnnnnnnnnnnnnnnnnnnnnnnnnnnnnnnnnnnnnnnnnnnnnnnnnnnnnnnnnnnnnnnnnnnnnnnnnnnnnnnnnnnnnnnnnnnnnnnnnnnnnnnnnnnnnnnnnnnnnnnnnnnnnnnnnnnnnnnnnnnnnnnnnnnnnnnnnnnnnnnnnnnnnnnnnnnnnnnnnnnnnnnnnnnnnnnnnnnnnnnnnnnnnnnnnnnnnnnnnnnnnnnnnnnnnnnnnnnnnnnnnnnnnnnnnnnnnnnnnnnnnnnnnnnnnnnnnnnnnnnnnnnnnnnnnnnnnnnnnnnnnnnnnnnnnnnnnnnnnnnnnnnnnnnnnnnnnnnnnnnnnnnnnnnnnnnnnnnnnnnnnnnnnnnnnnnnnnnnnnnnnnnnnnnnnnnnnnnnnnnnnnnnnnnnnnnnnnnnnnnnnnnnnnnnnnnnnnnnnnnnnnnnnnnnnnnnnnnnnnnnnnnnnnnnnnnnnnnnnnnnnnnnnnnnnnnnnnnnnnnnnnnnnnnnnnnnnnnnnnnnnnnnnnnnnnnnnnnnnnnnnnnnnnnnnnnnnnnnnnnnnnnnnnnnnnnnnnnnnnnnnnnnnnnnnnnnnnnnnnnnnnnnnnnnnnnnnnnnnnnnnnnnnnnnnnnnnnnnnnnnnnnnnnnnnnnnnnnnnnnnnnnnnnnnnnnnnnnnnnnnnnnnnnnnnnnnnnnnnnnnnnnnnnnnnnnnnnnnnnnnnnnnnnnnnnnnnnnnnnnnnnnnnnnnnnnnnnnnnnnnnnnnnnnnnnnnnnnnnnnnnnnnnnnnnnnnnnnnnnnnnnnnnnnnnnnnnnnnnnnnnnnnnnnnnnnnnnnnnnnnnnnnnnnnnnnnnnnnnnnnnnnnnnnnnnnnnnnnnnnnnnnnnnnnnnnnnnnnnnnnnnnnnnnnnnnnnnnnnnnnnnnnnnnnnnnnnnnnnnnnnnnnnnnnnnnnnnnnnnnnnnnnnnnnnnnnnnnnnnnnnnnnnnnnnnnnnnnnnnnnnnnnnnnnnnnnnnnnnnnnnnnnnnnnnnnnnnnnnnnnnnnnnnnnnnnnnnnnnnnnnnnnnnnnnnnnnnnnnnnnnnnnnnnnnnnnnnnnnnnnnnnnnnnnnnnnnnnnnnnnnnnnnnnnnnnnnnnnnnnnnnnnnnnnnnnnnnnnnnnnnnnnnnnnnnnnnnnnnnnnnnnnnnnnnnnnnnnnnnnnnnnnnnnnnnnnnnnnnnnnnnnnnnnnnnnnnnnnnnnnnnnnnnnnnnnnnnnnnnnnnnnnnnnnnnnnnnnnnnnnnnnnnnnnnnnnnnnnnnnnnnnnnnnnnnnnnnnnnnnnnnnnnnnnnnnnnnnnnnnnnnnnnnnnnnnnnnnnnnnnnnnnnnnnnnnnnnnnnnnnnnnnnnnnnnnnnnnnnnnnnnnnnnnnnnnnnnnnnnnnnnnnnnnnnnnnnnnnnnnnnnnnnnnnnnnnnnnnnnnnnnnnnnnnnnnnnnnnnnnnnnnnnnnnnnnnnnnnnnnnnnnnnnnnnnnnnnnnnnnnnnnnnnnnnnnnnnnnnnnnnnnnnnnnnnnnnnnnnnnnnnnnnnnnnnnnnnnnnnnnnnnnnnnnnnnnnnnnnnnnnnnnnnnnnnnnnnnnnnnnnnnnnnnnnnnnnnnnnnnnnnnnnnnnnnnnnnnnnnnnnnnnnnnnnnnnnnnnnnnnnnnnnnnnnnnnnnnnnnnnnnnnnnnnnnnnnnnnnnnnnnnnnnnnnnnnnnnnnnnnnnnnnnnnnnnnnnnnnnnnnnnnnnnnnnnnnnnnnnnnnnnnnnnnnnnnnnnnnnnnnnnnnnnnnnnnnnnnnnnnnnnnnnnnnnnnnnnnnnnnnnnnnnnnnnnnnnnnnnnnnnnnnnnnnnnnnnnnnnnnnnnnnnnnnnnnnnnnnnnnnnnnnnnnnnnnnnnnnnnnnnnnnnnnnnnnnnnnnnnnnnnnnnnnnnnnnnnnnnnnnnnnnnnnnnnnnnnnnnnnnnnnnnnnnnnnnnnnnnnnnnnnnnnnnnnnnnnnnnnnnnnnnnnnnnnnnnnnnnnnnnnnnnnnnnnnnnnnnnnnnnnnnnnnnnnnnnnnnnnnnnnnnnnnnnnnnnnnnnnnnnnnnnnnnnnnnnnnnnnnnnnnnnnnnnnnnnnnnnnnnnnnnnnnnnnnnnnnnnnnnnnnnnnnnnnnnnnnnnnnnnnnnnnnnnnnnnnnnnnnnnnnnnnnnnnnnnnnnnnnnnnnnnnnnnnnnnnnnnnnnnnnnnnnnnnnnnnnnnnnnnnnnnnnnnnnnnnnnnnnnnnnnnnnnnnnnnnnnnnnnnnnnnnnnnnnnnnnnnnnnnnnnnnnnnnnnnnnnnnnnnnnnnnnnnnnnnnnnnnnnnnnnnnnnnnnnnnnnnnnnnnnnnnnnnnnnnnnnnnnnnnnnnnnnnnnnnnnnnnnnnnnnnnnnnnnnnnnnnnnnnnnnnnnnnnnnnnnnnnnnnnnnnnnnnnnnnnnnnnnnnnnnnnnnnnnnnnnnnnnnnnnnnnnnnnnnnnnnnnnnnnnnnnnnnnnnnnnnnnnnnnnnnnnnnnnnnnnnnnnnnnnnnnnnnnnnnnnnnnnnnnnnnnnnnnnnnnnnnnnnnnnnnnnnnnnnnnnnnnnnnnnnnnnnnnnnnnnnnnnnnnnnnnnnnnnnnnnnnnnnnnnnnnnnnnnnnnnnnnnnnnnnnnnnnnnnnnnnnnnnnnnnnnnnnnnnnnnnnnnnnnnnnnnnnnnnnnnnnnnnnnnnnnnnnnnnnnnnnnnnnnnnnnnnnnnnnnnnnnnnnnnnnnnnnnnnnnnnnnnnnnnnnnnnnnnnnnnnnnnnnnnnnnnnnnnnnnnnnnnnnnnnnnnnnnnnnnnnnnnnnnnnnnnnnnnnnnnnnnnnnnnnnnnnnnnnnnnnnnnnnnnnnnnnnnnnnnnnnnnnnnnnnnnnnnnnnnnnnnnnnnnnnnnnnnnnnnnnnnnnnnnnnnnnnnnnnnnnnnnnnnnnnnnnnnnnnnnnnnnnnnnnnnnnnnnnnnnnnnnnnnnnnnnnnnnnnnnnnnnnnnnnnnnnnnnnnnnnnnnnnnnnnnnnnnnnnnnnnnnnnnnnnnnnnnnnnnnnnnnnnnnnnnnnnnnnnnnnnnnnnnnnnnnnnnnnnnnnnnnnnnnnnnnnnnnnnnnnnnnnnnnnnnnnnnnnnnnnnnnnnnnnnnnnnnnnnnnnnnnnnnnnnnnnnnnnnnnnnnnnnnnnnnnnnnnnnnnnnnnnnnnnnnnnnnnnnnnnnnnnnnnnnnnnnnnnnnnnnnnnnnnnnnnnnnnnnnnnnnnnnnnnnnnnnnnnnnnnnnnnnnnnnnnnnnnnnnnnnnnnnnnnnnnnnnnnnnnnnnnnnnnnnnnnnnnnnnnnnnnnnnnnnnnnnnnnnnnnnnnnnnnnnnnnnnnnnnnnnnnnnnnnnnnnnnnnnnnnnnnnnnnnnnnnnnnnnnnnnnnnnnnnnnnnnnnnnnnnnnnnnnnnnnnnnnnnnnnnnnnnnnnnnnnnnnnnnnnnnnnnnnnnnnnnnnnnnnnnnnnnnnnnnnnnnnnnnnnnnnnnnnnnnnnnnnnnnnnnnnnnnnnnnnnnnnnnnnnnnnnnnnnnnnnnnnnnnnnnnnnnnnnnnnnnnnnnnnnnnnnnnnnnnnnnnnnnnnnnnnnnnnnnnnnnnnnnnnnnnnnnnnnnnnnnnnnnnnnnnnnnnnnnnnnnnnnnnnnnnnnnnnnnnnnnnnnnnnnnnnnnnnnnnnnnnnnnnnnnnnnnnnnnnnnnnnnnnnnnnnnnnnnnnnnnnnnnnnnnnnnnnnnnnnnnnnnnnnnnnnnnnnnnnnnnnnnnnnnnnnnnnnnnnnnnnnnnnnnnnnnnnnnnnnnnnnnnnnnnnnnnnnnnnnnnnnnnnnnnnnnnnnnnnnnnnnnnnnnnnnnnnnnnnnnnnnnnnnnnnnnnnnnnnnnnnnnnnnnnnnnnnnnnnnnnnnnnnnnnnnnnnnnnnnnnnnnnnnnnnnnnnnnnnnnnnnnnnnnnnnnnnnnnnnnnnnnnnnnnnnnnnnnnnnnnnnnnnnnnnnnnnnnnnnnnnnnnnnnnnnnnnnnnnnnnnnnnnnnnnnnnnnnnnnnnnnnnnnnnnnnnnnnnnnnnnnnnnnnnnnnnnnnnnnnnnnnnnnnnnnnnnnnnnnnnnnnnnnnnnnnnnnnnnnnnnnnnnnnnnnnnnnnnnnnnnnnnnnnnnnnnnnnnnnnnnnnnnnnnnnnnnnnnnnnnnnnnnnnnnnnnnnnnnnnnnnnnnnnnnnnnnnnnnnnnnnnnnnnnnnnnnnnnnnnnnnnnnnnnnnnnnnnnnnnnnnnnnnnnnnnnnnnnnnnnnnnnnnnnnnnnnnnnnnnnnnnnnnnnnnnnnnnnnnnnnnnnnnnnnnnnnnnnnnnnnnnnnnnnnnnnnnnnnnnnnnnnnnnnnnnnnnnnnnnnnnnnnnnnnnnnnnnnnnnnnnnnnnnnnnnnnnnnnnnnnnnnnnnnnnnnnnnnnnnnnnnnnnnnnnnnnnnnnnnnnnnnnnnnnnnnnnnnnnnnnnnnnnnnnnnnnnnnnnnnnnnnnnnnnnnnnnnnnnnnnnnnnnnnnnnnnnnnnnnnnnnnnnnnnnnnnnnnnnnnnnnnnnnnnnnnnnnnnnnnnnnnnnnnnnnnnnnnnnnnnnnnnnnnnnnnnnnnnnnnnnnnnnnnnnnnnnnnnnnnnnnnnnnnnnnnnnnnnnnnnnnnnnnnnnnnnnnnnnnnnnnnnnnnnnnnnnnnnnnnnnnnnnnnnnnnnnnnnnnnnnnnnnnnnnnnnnnnnnnnnnnnnnnnnnnnnnnnnnnnnnnnnnnnnnnnnnnnnnnnnnnnnnnnnnnnnnnnnnnnnnnnnnnnnnnnnnnnnnnnnnnnnnnnnnnnnnnnnnnnnnnnnnnnnnnnnnnnnnnnnnnnnnnnnnnnnnnnnnnnnnnnnnnnnnnnnnnnnnnnnnnnnnnnnnnnnnnnnnnnnnnnnnnnnnnnnnnnnnnnnnnnnnnnnnnnnnnnnnnnnnnnnnnnnnnnnnnnnnnnnnnnnnnnnnnnnnnnnnnnnnnnnnnnnnnnnnnnnnnnnnnnnnnnnnnnnnnnnnnnnnnnnnnnnnnnnnnnnnnnnnnnnnnnnnnnnnnnnnnnnnnnnnnnnnnnnnnnnnnnnnnnnnnnnnnnnnnnnnnnnnnnnnnnnnnnnnnnnnnnnnnnnnnnnnnnnnnnnnnnnnnnnnnnnnnnnnnnnnnnnnnnnnnnnnnnnnnnnnnnnnnnnnnnnnnnnnnnnnnnnnnnnnnnnnnnnnnnnnnnnnnnnnnnnnnnnnnnnnnnnnnnnnnnnnnnnnnnnnnnnnnnnnnnnnnnnnnnnnnnnnnnnnnnnnnnnnnnnnnnnnnnnnnnnnnnnnnnnnnnnnnnnnnnnnnnnnnnnnnnnnnnnnnnnnnnnnnnnnnnnnnnnnnnnnnnnnnnnnnnnnnnnnnnnnnnnnnnnnnnnnnnnnnnnnnnnnnnnnnnnnnnnnnnnnnnnnnnnnnnnnnnnnnnnnnnnnnnnnnnnnnnnnnnnnnnnnnnnnnnnnnnnnnnnnnnnnnnnnnnnnnnnnnnnnnnnnnnnnnnnnnnnnnnnnnnnnnnnnnnnnnnnnnnnnnnnnnnnnnnnnnnnnnnnnnnnnnnnnnnnnnnnnnnnnnnnnnnnnnnnnnnnnnnnnnnnnnnnnnnnnnnnnnnnnnnnnnnnnnnnnnnnnnnnnnnnnnnnnnnnnnnnnnnnnnnnnnnnnnnnnnnnnnnnnnnnnnnnnnnnnnnnnnnnnnnnnnnnnnnnnnnnnnnnnnnnnnnnnnnnnnnnnnnnnnnnnnnnnnnnnnnnnnnnnnnnnnnnnnnnnnnnnnnnnnnnnnnnnnnnnnnnnnnnnnnnnnnnnnnnnnnnnnnnnnnnnnnnnnnnnnnnnnnnnnnnnnnnnnnnnnnnnnnnnnnnnnnnnnnnnnnnnnnnnnnnnnnnnnnnnnnnnnnnnnnnnnnnnnnnnnnnnnnnnnnnnnnnnnnnnnnnnnnnnnnnnnnnnnnnnnnnnnnnnnnnnnnnnnnnnnnnnnnnnnnnnnnnnnnnnnnnnnnnnnnnnnnnnnnnnnnnnnnnnnnnnnnnnnnnnnnnnnnnnnnnnnnnnnnnnnnnnnnnnnnnnnnnnnnnnnnnnnnnnnnnnnnnnnnnnnnnnnnnnnnnnnnnnnnnnnnnnnnnnnnnnnnnnnnnnnnnnnnnnnnnnnnnnnnnnnnnnnnnnnnnnnnnnnnnnnnnnnnnnnnnnnnnnnnnnnnnnnnnnnnnnnnnnnnnnnnnnnnnnnnnnnnnnnnnnnnnnnnnnnnnnnnnnnnnnnnnnnnnnnnnnnnnnnnnnnnnnnnnnnnnnnnnnnnnnnnnnnnnnnnnnnnnnnnnnnnnnnnnnnnnnnnnnnnnnnnnnnnnnnnnnnnnnnnnnnnnnnnnnnnnnnnnnnnnnnnnnnnnnnnnnnnnnnnnnnnnnnnnnnnnnnnnnnnnnnnnnnnnnnnnnnnnnnnnnnnnnnnnnnnnnnnnnnnnnnnnnnnnnnnnnnnnnnnnnnnnnnnnnnnnnnnnnnnnnnnnnnnnnnnnnnnnnnnnnnnnnnnnnnnnnnnnnnnnnnnnnnnnnnnnnnnnnnnnnnnnnnnnnnnnnnnnnnnnnnnnnnnnnnnnnnnnnnnnnnnnnnnnnnnnnnnnnnnnnnnnnnnnnnnnnnnnnnnnnnnnnnnnnnnnnnnnnnnnnnnnnnnnnnnnnnnnnnnnnnnnnnnnnnnnnnnnnnnnnnnnnnnnnnnnnnnnnnnnnnnnnnnnnnnnnnnnnnnnnnnnnnnnnnnnnnnnnnnnnnnnnnnnnnnnnnnnnnnnnnnnnnnnnnnnnnnnnnnnnnnnnnnnnnnnnnnnnnnnnnnnnnnnnnnnnnnnnnnnnnnnnnnnnnnnnnnnnnnnnnnnnnnnnnnnnnnnnnnnnnnnnnnnnnnnnnnnnnnnnnnnnnnnnnnnnnnnnnnnnnnnnnnnnnnnnnnnnnnnnnnnnnnnnnnnnnnnnnnnnnnnnnnnnnnnnnnnnnnnnnnnnnnnnnnnnnnnnnnnnnnnnnnnnnnnnnnnnnnnnnnnnnnnnnnnnnnnnnnnnnnnnnnnnnnnnnnnnnnnnnnnnnnnnnnnnnnnnnnnnnnnnnnnnnnnnnnnnnnnnnnnnnnnnnnnnnnnnnnnnnnnnnnnnnnnnnnnnnnnnnnnnnnnnnnnnnnnnnnnnnnnnnnnnnnnnnnnnnnnnnnnnnnnnnnnnnnnnnnnnnnnnnnnnnnnnnnnnnnnnnnnnnnnnnnnnnnnnnnnnnnnnnnnnnnnnnnnnnnnnnnnnnnnnnnnnnnnnnnnnnnnnnnnnnnnnnnnnnnnnnnnnnnnnnnnnnnnnnnnnnnnnnnnnnnnnnnnnnnnnnnnnnnnnnnnnnnnnnnnnnnnnnnnnnnnnnnnnnnnnnnnnnnnnnnnnnnnnnnnnnnnnnnnnnnnnnnnnnnnnnnnnnnnnnnnnnnnnnnnnnnnnnnnnnnnnnnnnnnnnnnnnnnnnnnnnnnnnnnnnnnnnnnnnnnnnnnnnnnnnnnnnnnnnnnnnnnnnnnnnnnnnnnnnnnnnnnnnnnnnnnnnnnnnnnnnnnnnnnnnnnnnnnnnnnnnnnnnnnnnnnnnnnnnnnnnnnnnnnnnnnnnnnnnnnnnnnnnnnnnnnnnnnnnnnnnnnnnnnnnnnnnnnnnnnnnnnnnnnnnnnnnnnnnnnnnnnnnnnnnnnnnnnnnnnnnnnnnnnnnnnnnnnnnnnnnnnnnnnnnnnnnnnnnnnnnnnnnnnnnnnnnnnnnnnnnnnnnnnnnnnnnnnnnnnnnnnnnnnnnnnnnnnnnnnnnnnnnnnnnnnnnnnnnnnnnnnnnnnnnnnnnnnnnnnnnnnnnnnnnnnnnnnnnnnnnnnnnnnnnnnnnnnnnnnnnnnnnnnnnnnnnnnnnnnnnnnnnnnnnnnnnnnnnnnnnnnnnnnnnnnnnnnnnnnnnnnnnnnnnnnnnnnnnnnnnnnnnnnnnnnnnnnnnnnnnnnnnnnnnnnnnnnnnnnnnnnnnnnnnnnnnnnnnnnnnnnnnnnnnnnnnnnnnnnnnnnnnnnnnnnnnnnnnnnnnnnnnnnnnnnnnnnnnnnnnnnnnnnnnnnnnnnnnnnnnnnnnnnnnnnnnnnnnnnnnnnnnnnnnnnnnnnnnnnnnnnnnnnnnnnnnnnnnnnnnnnnnnnnnnnnnnnnnnnnnnnnnnnnnnnnnnnnnnnnnnnnnnnnnnnnnnnnnnnnnnnnnnnnnnnnnnnnnnnnnnnnnnnnnnnnnnnnnnnnnnnnnnnnnnnnnnnnnnnnnnnnnnnnnnnnnnnnnnnnnnnnnnnnnnnnnnnnnnnnnnnnnnnnnnnnnnnnnnnnnnnnnnnnnnnnnnnnnnnnnnnnnnnnnnnnnnnnnnnnnnnnnnnnnnnnnnnnnnnnnnnnnnnnnnnnnnnnnnnnnnnnnnnnnnnnnnnnnnnnnnnnnnnnnnnnnnnnnnnnnnnnnnnnnnnnnnnnnnnnnnnnnnnnnnnnnnnnnnnnnnnnnnnnnnnnnnnnnnnnnnnnnnnnnnnnnnnnnnnnnnnnnnnnnnnnnnnnnnnnnnnnnnnnnnnnnnnnnnnnnnnnnnnnnnnnnnnnnnnnnnnnnnnnnnnnnnnnnnnnnnnnnnnnnnnnnnnnnnnnnnnnnnnnnnnnnnnnnnnnnnnnnnnnnnnnnnnnnnnnnnnnnnnnnnnnnnnnnnnnnnnnnnnnnnnnnnnnnnnnnnnnnnnnnnnnnnnnnnnnnnnnnnnnnnnnnnnnnnnnnnnnnnnnnnnnnnnnnnnnnnnnnnnnnnnnnnnnnnnnnnnnnnnnnnnnnnnnnnnnnnnnnnnnnnnnnnnnnnnnnnnnnnnnnnnnnnnnnnnnnnnnnnnnnnnnnnnnnnnnnnnnnnnnnnnnnnnnnnnnnnnnnnnnnnnnnnnnnnnnnnnnnnnnnnnnnnnnnnnnnnnnnnnnnnnnnnnnnnnnnnnnnnnnnnnnnnnnnnnnnnnnnnnnnnnnnnnnnnnnnnnnnnnnnnnnnnnnnnnnnnnnnnnnnnnnnnnnnnnnnnnnnnnnnnnnnnnnnnnnnnnnnnnnnnnnnnnnnnnnnnnnnnnnnnnnnnnnnnnnnnnnnnnnnnnnnnnnnnnnnnnnnnnnnnnnnnnnnnnnnnnnnnnnnnnnnnnnnnnnnnnnnnnnnnnnnnnnnnnnnnnnnnnnnnnnnnnnnnnnnnnnnnnnnnnnnnnnnnnnnnnnnnnnnnnnnnnnnnnnnnnnnnnnnnnnnnnnnnnnnnnnnnnnnnnnnnnnnnnnnnnnnnnnnnnnnnnnnnnnnnnnnnnnnnnnnnnnnnnnnnnnnnnnnnnnnnnnnnnnnnnnnnnnnnnnnnnnnnnnnnnnnnnnnnnnnnnnnnnnnnnnnnnnnnnnnnnnnnnnnnnnnnnnnnnnnnnnnnnnnnnnnnnnnnnnnnnnnnnnnnnnnnnnnnnnnnnnnnnnnnnnnnnnnnnnnnnnnnnnnnnnnnnnnnnnnnnnnnnnnnnnnnnnnnnnnnnnnnnnnnnnnnnnnnnnnnnnnnnnnnnnnnnnnnnnnnnnnnnnnnnnnnnnnnnnnnnnnnnnnnnnnnnnnnnnnnnnnnnnnnnnnnnnnnnnnnnnnnnnnnnnnnnnnnnnnnnnnnnnnnnnnnnnnnnnnnnnnnnnnnnnnnnnnnnnnnnnnnnnnnnnnnnnnnnnnnnnnnnnnnnnnnnnnnnnnnnnnnnnnnnnnnnnnnnnnnnnnnnnnnnnnnnnnnnnnnnnnnnnnnnnnnnnnnnnnnnnnnnnnnnnnnnnnnnnnnnnnnnnnnnnnnnnnnnnnnnnnnnnnnnnnnnnnnnnnnnnnnnnnnnnnnnnnnnnnnnnnnnnnnnnnnnnnnnnnnnnnnnnnnnnnnnnnnnnnnnnnnnnnnnnnnnnnnnnnnnnnnnnnnnnnnnnnnnnnnnnnnnnnnnnnnnnnnnnnnnnnnnnnnnnnnnnnnnnnnnnnnnnnnnnnnnnnnnnnnnnnnnnnnnnnnnnnnnnnnnnnnnnnnnnnnnnnnnnnnnnnnnnnnnnnnnnnnnnnnnnnnnnnnnnnnnnnnnnnnnnnnnnnnnnnnnnnnnnnnnnnnnnnnnnnnnnnnnnnnnnnnnnnnnnnnnnnnnnnnnnnnnnnnnnnnnnnnnnnnnnnnnnnnnnnnnnnnnnnnnnnnnnnnnnnnnnnnnnnnnnnnnnnnnnnnnnnnnnnnnnnnnnnnnnnnnnnnnnnnnnnnnnnnnnnnnnnnnnnnnnnnnnnnnnnnnnnnnnnnnnnnnnnnnnnnnnnnnnnnnnnnnnnnnnnnnnnnnnnnnnnnnnnnnnnnnnnnnnnnnnnnnnnnnnnnnnnnnnnnnnnnnnnnnnnnnnnnnnnnnnnnnnnnnnnnnnnnnnnnnnnnnnnnnnnnnnnnnnnnnnnnnnnnnnnnnnnnnnnnnnnnnnnnnnnnnnnnnnnnnnnnnnnnnnnnnnnnnnnnnnnnnnnnnnnnnnnnnnnnnnnnnnnnnnnnnnnnnnnnnnnnnnnnnnnnnnnnnnnnnnnnnnnnnnnnnnnnnnnnnnnnnnnnnnnnnnnnnnnnnnnnnnnnnnnnnnnnnnnnnnnnnnnnnnnnnnnnnnnnnnnnnnnnnnnnnnnnnnnnnnnnnnnnnnnnnnnnnnnnnnnnnnnnnnnnnnnnnnnnnnnnnnnnnnnnnnnnnnnnnnnnnnnnnnnnnnnnnnnnnnnnnnnnnnnnnnnnnnnnnnnnnnnnnnnnnnnnnnnnnnnnnnnnnnnnnnnnnnnnnnnnnnnnnnnnnnnnnnnnnnnnnnnnnnnnnnnnnnnnnnnnnnnnnnnnnnnnnnnnnnnnnnnnnnnnnnnnnnnnnnnnnnnnnnnnnnnnnnnnnnnnnnnnnnnnnnnnnnnnnnnnnnnnnnnnnnnnnnnnnnnnnnnnnnnnnnnnnnnnnnnnnnnnnnnnnnnnnnnnnnnnnnnnnnnnnnnnnnnnnnnnnnnnnnnnnnnnnnnnnnnnnnnnnnnnnnnnnnnnnnnnnnnnnnnnnnnnnnnnnnnnnnnnnnnnnnnnnnnnnnnnnnnnnnnnnnnnnnnnnnnnnnnnnnnnnnnnnnnnnnnnnnnnnnnnnnnnnnnnnnnnnnnnnnnnnnnnnnnnnnnnnnnnnnnnnnnnnnnnnnnnnnnnnnnnnnnnnnnnnnnnnnnnnnnnnnnnnnnnnnnnnnnnnnnnnnnnnnnnnnnnnnnnnnnnnnnnnnnnnnnnnnnnnnnnnnnnnnnnnnnnnnnnnnnnnnnnnnnnnnnnnnnnnnnnnnnnnnnnnnnnnnnnnnnnnnnnnnnnnnnnnnnnnnnnnnnnnnnnnnnnnnnnnnnnnnnnnnnnnnnnnnnnnnnnnnnnnnnnnnnnnnnnnnnnnnnnnnnnnnnnnnnnnnnnnnnnnnnnnnnnnnnnnnnnnnnnnnnnnnnnnnnnnnnnnnnnnnnnnnnnnnnnnnnnnnnnnnnnnnnnnnnnnnnnnnnnnnnnnnnnnnnnnnnnnnnnnnnnnnnnnnnnnnnnnnnnnnnnnnnnnnnnnnnnnnnnnnnnnnnnnnnnnnnnnnnnnnnnnnnnnnnnnnnnnnnnnnnnnnnnnnnnnnnnnnnnnnnnnnnnnnnnnnnnnnnnnnnnnnnnnnnnnnnnnnnnnnnnnnnnnnnnnnnnnnnnnnnnnnnnnnnnnnnnnnnnnnnnnnnnnnnnnnnnnnnnnnnnnnnnnnnnnnnnnnnnnnnnnnnnnnnnnnnnnnnnnnnnnnnnnnnnnnnnnnnnnnnnnnnnnnnnnnnnnnnnnnnnnnnnnnnnnnnnnnnnnnnnnnnnnnnnnnnnnnnnnnnnnnnnnnnnnnnnnnnnnnnnnnnnnnnnnnnnnnnnnnnnnnnnnnnnnnnnnnnnnnnnnnnnnnnnnnnnnnnnnnnnnnnnnnnnnnnnnnnnnnnnnnnnnnnnnnnnnnnnnnnnnnnnnnnnnnnnnnnnnnnnnnnnnnnnnnnnnnnnnnnnnnnnnnnnnnnnnnnnnnnnnnnnnnnnnnnnnnnnnnnnnnnnnnnnnnnnnnnnnnnnnnnnnnnnnnnnnnnnnnnnnnnnnnnnnnnnnnnnnnnnnnnnnnnnnnnnnnnnnnnnnnnnnnnnnnnnnnnnnnnnnnnnnnnnnnnnnnnnnnnnnnnnnnnnnnnnnnnnnnnnnnnnnnnnnnnnnnnnnnnnnnnnnnnnnnnnnnnnnnnnnnnnnnnnnnnnnnnnnnnnnnnnnnnnnnnnnnnnnnnnnnnnnnnnnnnnnnnnnnnnnnnnnnnnnnnnnnnnnnnnnnnnnnnnnnnnnnnnnnnnnnnnnnnnnnnnnnnnnnnnnnnnnnnnnnnnnnnnnnnnnnnnnnnnnnnnnnnnnnnnnnnnnnnnnnnnnnnnnnnnnnnnnnnnnnnnnnnnnnnnnnnnnnnnnnnnnnnnnnnnnnnnnnnnnnnnnnnnnnnnnnnnnnnnnnnnnnnnnnnnnnnnnnnnnnnnnnnnnnnnnnnnnnnnnnnnnnnnnnnnnnnnnnnnnnnnnnnnnnnnnnnnnnnnnnnnnnnnnnnnnnnnnnnnnnnnnnnnnnnnnnnnnnnnnnnnnnnnnnnnnnnnnnnnnnnnnnnnnnnnnnnnnnnnnnnnnnnnnnnnnnnnnnnnnnnnnnnnnnnnnnnnnnnnnnnnnnnnnnnnnnnnnnnnnnnnnnnnnnnnnnnnnnnnnnnnnnnnnnnnnnnnnnnnnnnnnnnnnnnnnnnnnnnnnnnnnnnnnnnnnnnnnnnnnnnnnnnnnnnnnnnnnnnnnnnnnnnnnnnnnnnnnnnnnnnnnnnnnnnnnnnnnnnnnnnnnnnnnnnnnnnnnnnnnnnnnnnnnnnnnnnnnnnnnnnnnnnnnnnnnnnnnnnnnnnnnnnnnnnnnnnnnnnnnnnnnnnnnnnnnnnnnnnnnnnnnnnnnnnnnnnnnnnnnnnnnnnnnnnnnnnnnnnnnnnnnnnnnnnnnnnnnnnnnnnnnnnnnnnnnnnnnnnnnnnnnnnnnnnnnnnnnnnnnnnnnnnnnnnnnnnnnnnnnnnnnnnnnnnnnnnnnnnnnnnnnnnnnnnnnnnnnnnnnnnnnnnnnnnnnnnnnnnnnnnnnnnnnnnnnnnnnnnnnnnnnnnnnnnnnnnnnnnnnnnnnnnnnnnnnnnnnnnnnnnnnnnnnnnnnnnnnnnnnnnnnnnnnnnnnnnnnnnnnnnnnnnnnnnnnnnnnnnnnnnnnnnnnnnnnnnnnnnnnnnnnnnnnnnnnnnnnnnnnnnnnnnnnnnnnnnnnnnnnnnnnnnnnnnnnnnnnnnnnnnnnnnnnnnnnnnnnnnnnnnnnnnnnnnnnnnnnnnnnnnnnnnnnnnnnnnnnnnnnnnnnnnnnnnnnnnnnnnnnnnnnnnnnnnnnnnnnnnnnnnnnnnnnnnnnnnnnnnnnnnnnnnnnnnnnnnnnnnnnnnnnnnnnnnnnnnnnnnnnnnnnnnnnnnnnnnnnnnnnnnnnnnnnnnnnnnnnnnnnnnnnnnnnnnnnnnnnnnnnnnnnnnnnnnnnnnnnnnnnnnnnnnnnnnnnnnnnnnnnnnnnnnnnnnnnnnnnnnnnnnnnnnnnnnnnnnnnnnnnnnnnnnnnnnnnnnnnnnnnnnnnnnnnnnnnnnnnnnnnnnnnnnnnnnnnnnnnnnnnnnnnnnnnnnnnnnnnnnnnnnnnnnnnnnnnnnnnnnnnnnnnnnnnnnnnnnnnnnnnnnnnnnnnnnnnnnnnnnnnnnnnnnnnnnnnnnnnnnnnnnnnnnnnnnnnnnnnnnnnnnnnnnnnnnnnnnnnnnnnnnnnnnnnnnnnnnnnnnnnnnnnnnnnnnnnnnnnnnnnnnnnnnnnnnnnnnnnnnnnnnnnnnnnnnnnnnnnnnnnnnnnnnnnnnnnnnnnnnnnnnnnnnnnnnnnnnnnnnnnnnnnnnnnnnnnnnnnnnnnnnnnnnnnnnnnnnnnnnnnnnnnnnnnnnnnnnnnnnnnnnnnnnnnnnnnnnnnnnnnnnnnnnnnnnnnnnnnnnnnnnnnnnnnnnnnnnnnnnnnnnnnnnnnnnnnnnnnnnnnnnnnnnnnnnnnnnnnnnnnnnnnnnnnnnnnnnnnnnnnnnnnnnnnnnnnnnnnnnnnnnnnnnnnnnnnnnnnnnnnnnnnnnnnnnnnnnnnnnnnnnnnnnnnnnnnnnnnnnnnnnnnnnnnnnnnnnnnnnnnnnnnnnnnnnnnnnnnnnnnnnnnnnnnnnnnnnnnnnnnnnnnnnnnnnnnnnnnnnnnnnnnnnnnnnnnnnnnnnnnnnnnnnnnnnnnnnnnnnnnnnnnnnnnnnnnnnnnnnnnnnnnnnnnnnnnnnnnnnnnnnnnnnnnnnnnnnnnnnnnnnnnnnnnnnnnnnnnnnnnnnnnnnnnnnnnnnnnnnnnnnnnnnnnnnnnnnnnnnnnnnnnnnnnnnnnnnnnnnnnnnnnnnnnnnnnnnnnnnnnnnnnnnnnnnnnnnnnnnnnnnnnnnnnnnnnnnnnnnnnnnnnnnnnnnnnnnnnnnnnnnnnnnnnnnnnnnnnnnnnnnnnnnnnnnnnnnnnnnnnnnnnnnnnnnnnnnnnnnnnnnnnnnnnnnnnnnnnnnnnnnnnnnnnnnnnnnnnnnnnnnnnnnnnnnnnnnnnnnnnnnnnnnnnnnnnnnnnnnnnnnnnnnnnnnnnnnnnnnnnnnnnnnnnnnnnnnnnnnnnnnnnnnnnnnnnnnnnnnnnnnnnnnnnnnnnnnnnnnnnnnnnnnnnnnnnnnnnnnnnnnnnnnnnnnnnnnnnnnnnnnnnnnnnnnnnnnnnnnnnnnnnnnnnnnnnnnnnnnnnnnnnnnnnnnnnnnnnnnnnnnnnnnnnnnnnnnnnnnnnnnnnnnnnnnnnnnnnnnnnnnnnnnnnnnnnnnnnnnnnnnnnnnnnnnnnnnnnnnnnnnnnnnnnnnnnnnnnnnnnnnnnnnnnnnnnnnnnnnnnnnnnnnnnnnnnnnnnnnnnnnnnnnnnnnnnnnnnnnnnnnnnnnnnnnnnnnnnnnnnnnnnnnnnnnnnnnnnnnnnnnnnnnnnnnnnnnnnnnnnnnnnnnnnnnnnnnnnnnnnnnnnnnnnnnnnnnnnnnnnnnnnnnnnnnnnnnnnnnnnnnnnnnnnnnnnnnnnnnnnnnnnnnnnnnnnnnnnnnnnnnnnnnnnnnnnnnnnnnnnnnnnnnnnnnnnnnnnnnnnnnnnnnnnnnnnnnnnnnnnnnnnnnnnnnnnnnnnnnnnnnnnnnnnnnnnnnnnnnnnnnnnnnnnnnnnnnnnnnnnnnnnnnnnnnnnnnnnnnnnnnnnnnnnnnnnnnnnnnnnnnnnnnnnnnnnnnnnnnnnnnnnnnnnnnnnnnnnnnnnnnnnnnnnnnnnnnnnnnnnnnnnnnnnnnnnnnnnnnnnnnnnnnnnnnnnnnnnnnnnnnnnnnnnnnnnnnnnnnnnnnnnnnnnnnnnnnnnnnnnnnnnnnnnnnnnnnnnnnnnnnnnnnnnnnnnnnnnnnnnnnnnnnnnnnnnnnnnnnnnnnnnnnnnnnnnnnnnnnnnnnnnnnnnnnnnnnnnnnnnnnnnnnnnnnnnnnnnnnnnnnnnnnnnnnnnnnnnnnnnnnnnnnnnnnnnnnnnnnnnnnnnnnnnnnnnnnnnnnnnnnnnnnnnnnnnnnnnnnnnnnnnnnnnnnnnnnnnnnnnnnnnnnnnnnnnnnnnnnnnnnnnnnnnnnnnnnnnnnnnnnnnnnnnnnnnnnnnnnnnnnnnnnnnnnnnnnnnnnnnnnnnnnnnnnnnnnnnnnnnnnnnnnnnnnnnnnnnnnnnnnnnnnnnnnnnnnnnnnnnnnnnnnnnnnnnnnnnnnnnnnnnnnnnnnnnnnnnnnnnnnnnnnnnnnnnnnnnnnnnnnnnnnnnnnnnnnnnnnnnnnnnnnnnnnnnnnnnnnnnnnnnnnnnnnnnnnnnnnnnnnnnnnnnnnnnnnnnnnnnnnnnnnnnnnnnnnnnnnnnnnnnnnnnnnnnnnnnnnnnnnnnnnnnnnnnnnnnnnnnnnnnnnnnnnnnnnnnnnnnnnnnnnnnnnnnnnnnnnnnnnnnnnnnnnnnnnnnnnnnnnnnnnnnnnnnnnnnnnnnnnnnnnnnnnnnnnnnnnnnnnnnnnnnnnnnnnnnnnnnnnnnnnnnnnnnnnnnnnnnnnnnnnnnnnnnnnnnnnnnnnnnnnnnnnnnnnnnnnnnnnnnnnnnnnnnnnnnnnnnnnnnnnnnnnnnnnnnnnnnnnnnnnnnnnnnnnnnnnnnnnnnnnnnnnnnnnnnnnnnnnnnnnnnnnnnnnnnnnnnnnnnnnnnnnnnnnnnnnnnnnnnnnnnnnnnnnnnnnnnnnnnnnnnnnnnnnnnnnnnnnnnnnnnnnnnnnnnnnnnnnnnnnnnnnnnnnnnnnnnnnnnnnnnnnnnnnnnnnnnnnnnnnnnnnnnnnnnnnnnnnnnnnnnnnnnnnnnnnnnnnnnnnnnnnnnnnnnnnnnnnnnnnnnnnnnnnnnnnnnnnnnnnnnnnnnnnnnnnnnnnnnnnnnnnnnnnnnnnnnnnnnnnnnnnnnnnnnnnnnnnnnnnnnnnnnnnnnnnnnnnnnnnnnnnnnnnnnnnnnnnnnnnnnnnnnnnnnnnnnnnnnnnnnnnnnnnnnnnnnnnnnnnnnnnnnnnnnnnnnnnnnnnnnnnnnnnnnnnnnnnnnnnnnnnnnnnnnnnnnnnnnnnnnnnnnnnnnnnnnnnnnnnnnnnnnnnnnnnnnnnnnnnnnnnnnnnnnnnnnnnnnnnnnnnnnnnnnnnnnnnnnnnnnnnnnnnnnnnnnnnnnnnnnnnnnnnnnnnnnnnnnnnnnnnnnnnnnnnnnnnnnnnnnnnnnnnnnnnnnnnnnnnnnnnnnnnnnnnnnnnnnnnnnnnnnnnnnnnnnnnnnnnnnnnnnnnnnnnnnnnnnnnnnnnnnnnnnnnnnnnnnnnnnnnnnnnnnnnnnnnnnnnnnnnnnnnnnnnnnnnnnnnnnnnnnnnnnnnnnnnnnnnnnnnnnnnnnnnnnnnnnnnnnnnnnnnnnnnnnnnnnnnnnnnnnnnnnnnnnnnnnnnnnnnnnnnnnnnnnnnnnnnnnnnnnnnnnnnnnnnnnnnnnnnnnnnnnnnnnnnnnnnnnnnnnnnnnnnnnnnnnnnnnnnnnnnnnnnnnnnnnnnnnnnnnnnnnnnnnnnnnnnnnnnnnnnnnnnnnnnnnnnnnnnnnnnnnnnnnnnnnnnnnnnnnnnnnnnnnnnnnnnnnnnnnnnnnnnnnnnnnnnnnnnnnnnnnnnnnnnnnnnnnnnnnnnnnnnnnnnnnnnnnnnnnnnnnnnnnnnnnnnnnnnnnnnnnnnnnnnnnnnnnnnnnnnnnnnnnnnnnnnnnnnnnnnnnnnnnnnnnnnnnnnnnnnnnnnnnnnnnnnnnnnnnnnnnnnnnnnnnnnnnnnnnnnnnnnnnnnnnnnnnnnnnnnnnnnnnnnnnnnnnnnnnnnnnnnnnnnnnnnnnnnnnnnnnnnnnnnnnnnnnnnnnnnnnnnnnnnnnnnnnnnnnnnnnnnnnnnnnnnnnnnnnnnnnnnnnnnnnnnnnnnnnnnnnnnnnnnnnnnnnnnnnnnnnnnnnnnnnnnnnnnnnnnnnnnnnnnnnnnnnnnnnnnnnnnnnnnnnnnnnnnnnnnnnnnnnnnnnnnnnnnnnnnnnnnnnnnnnnnnnnnnnnnnnnnnnnnnnnnnnnnnnnnnnnnnnnnnnnnnnnnnnnnnnnnnnnnnnnnnnnnnnnnnnnnnnnnnnnnnnnnnnnnnnnnnnnnnnnnnnnnnnnnnnnnnnnnnnnnnnnnnnnnnnnnnnnnnnnnnnnnnnnnnnnnnnnnnnnnnnnnnnnnnnnnnnnnnnnnnnnnnnnnnnnnnnnnnnnnnnnnnnnnnnnnnnnnnnnnnnnnnnnnnnnnnnnnnnnnnnnnnnnnnnnnnnnnnnnnnnnnnnnnnnnnnnnnnnnnnnnnnnnnnnnnnnnnnnnnnnnnnnnnnnnnnnnnnnnnnnnnnnnnnnnnnnnnnnnnnnnnnnnnnnnnnnnnnnnnnnnnnnnnnnnnnnnnnnnnnnnnnnnnnnnnnnnnnnnnnnnnnnnnnnnnnnnnnnnnnnnnnnnnnnnnnnnnnnnnnnnnnnnnnnnnnnnnnnnnnnnnnnnnnnnnnnnnnnnnnnnnnnnnnnnnnnnnnnnnnnnnnnnnnnnnnnnnnnnnnnnnnnnnnnnnnnnnnnnnnnnnnnnnnnnnnnnnnnnnnnnnnnnnnnnnnnnnnnnnnnnnnnnnnnnnnnnnnnnnnnnnnnnnnnnnnnnnnnnnnnnnnnnnnnnnnnnnnnnnnnnnnnnnnnnnnnnnnnnnnnnnnnnnnnnnnnnnnnnnnnnnnnnnnnnnnnnnnnnnnnnnnnnnnnnnnnnnnnnnnnnnnnnnnnnnnnnnnnnnnnnnnnnnnnnnnnnnnnnnnnnnnnnnnnnnnnnnnnnnnnnnnnnnnnnnnnnnnnnnnnnnnnnnnnnnnnnnnnnnnnnnnnnnnnnnnnnnnnnnnnnnnnnnnnnnnnnnnnnnnnnnnnnnnnnnnnnnnnnnnnnnnnnnnnnnnnnnnnnnnnnnnnnnnnnnnnnnnnnnnnnnnnnnnnnnnnnnnnnnnnnnnnnnnnnnnnnnnnnnnnnnnnnnnnnnnnnnnnnnnnnnnnnnnnnnnnnnnnnnnnnnnnnnnnnnnnnnnnnnnnnnnnnnnnnnnnnnnnnnnnnnnnnnnnnnnnnnnnnnnnnnnnnnnnnnnnnnnnnnnnnnnnnnnnnnnnnnnnnnnnnnnnnnnnnnnnnnnnnnnnnnnnnnnnnnnnnnnnnnnnnnnnnnnnnnnnnnnnnnnnnnnnnnnnnnnnnnnnnnnnnnnnnnnnnnnnnnnnnnnnnnnnnnnnnnnnnnnnnnnnnnnnnnnnnnnnnnnnnnnnnnnnnnnnnnnnnnnnnnnnnnnnnnnnnnnnnnnnnnnnnnnnnnnnnnnnnnnnnnnnnnnnnnnnnnnnnnnnnnnnnnnnnnnnnnnnnnnnnnnnnnnnnnnnnnnnnnnnnnnnnnnnnnnnnnnnnnnnnnnnnnnnnnnnnnnnnnnnnnnnnnnnnnnnnnnnnnnnnnnnnnnnnnnnnnnnnnnnnnnnnnnnnnnnnnnnnnnnnnnnnnnnnnnnnnnnnnnnnnnnnnnnnnnnnnnnnnnnnnnnnnnnnnnnnnnnnnnnnnnnnnnnnnnnnnnnnnnnnnnnnnnnnnnnnnnnnnnnnnnnnnnnnnnnnnnnnnnnnnnnnnnnnnnnnnnnnnnnnnnnnnnnnnnnnnnnnnnnnnnnnnnnnnnnnnnnnnnnnnnnnnnnnnnnnnnnnnnnnnnnnnnnnnnnnnnnnnnnnnnnnnnnnnnnnnnnnnnnnnnnnnnnnnnnnnnnnnnnnnnnnnnnnnnnnnnnnnnnnnnnnnnnnnnnnnnnnnnnnnnnnnnnnnnnnnnnnnnnnnnnnnnnnnnnnnnnnnnnnnnnnnnnnnnnnnnnnnnnnnnnnnnnnnnnnnnnnnnnnnnnnnnnnnnnnnnnnnnnnnnnnnnnnnnnnnnnnnnnnnnnnnnnnnnnnnnnnnnnnnnnnnnnnnnnnnnnnnnnnnnnnnnnnnnnnnnnnnnnnnnnnnnnnnnnnnnnnnnnnnnnnnnnnnnnnnnnnnnnnnnnnnnnnnnnnnnnnnnnnnnnnnnnnnnnnnnnnnnnnnnnnnnnnnnnnnnnnnnnnnnnnnnnnnnnnnnnnnnnnnnnnnnnnnnnnnnnnnnnnnnnnnnnnnnnnnnnnnnnnnnnnnnnnnnnnnnnnnnnnnnnnnnnnnnnnnnnnnnnnnnnnnnnnnnnnnnnnnnnnnnnnnnnnnnnnnnnnnnnnnnnnnnnnnnnnnnnnnnnnnnnnnnnnnnnnnnnnnnnnnnnnnnnnnnnnnnnnnnnnnnnnnnnnnnnnnnnnnnnnnnnnnnnnnnnnnnnnnnnnnnnnnnnnnnnnnnnnnnnnnnnnnnnnnnnnnnnnnnnnnnnnnnnnnnnnnnnnnnnnnnnnnnnnnnnnnnnnnnnnnnnnnnnnnnnnnnnnnnnnnnnnnnnnnnnnnnnnnnnnnnnnnnnnnnnnnnnnnnnnnnnnnnnnnnnnnnnnnnnnnnnnnnnnnnnnnnnnnnnnnnnnnnnnnnnnnnnnnnnnnnnnnnnnnnnnnnnnnnnnnnnnnnnnnnnnnnnnnnnnnnnnnnnnnnnnnnnnnnnnnnnnnnnnnnnnnnnnnnnnnnnnnnnnnnnnnnnnnnnnnnnnnnnnnnnnnnnnnnnnnnnnnnnnnnnnnnnnnnnnnnnnnnnnnnnnnnnnnnnnnnnnnnnnnnnnnnnnnnnnnnnnnnnnnnnnnnnnnnnnnnnnnnnnnnnnnnnnnnnnnnnnnnnnnnnnnnnnnnnnnnnnnnnnnnnnnnnnnnnnnnnnnnnnnnnnnnnnnnnnnnnnnnnnnnnnnnnnnnnnnnnnnnnnnnnnnnnnnnnnnnnnnnnnnnnnnnnnnnnnnnnnnnnnnnnnnnnnnnnnnnnnnnnnnnnnnnnnnnnnnnnnnnnnnnnnnnnnnnnnnnnnnnnnnnnnnnnnnnnnnnnnnnnnnnnnnnnnnnnnnnnnnnnnnnnnnnnnnnnnnnnnnnnnnnnnnnnnnnnnnnnnnnnnnnnnnnnnnnnnnnnnnnnnnnnnnnnnnnnnnnnnnnnnnnnnnnnnnnnnnnnnnnnnnnnnnnnnnnnnnnnnnnnnnnnnnnnnnnnnnnnnnnnnnnnnnnnnnnnnnnnnnnnnnnnnnnnnnnnnnnnnnnnnnnnnnnnnnnnnnnnnnnnnnnnnnnnnnnnnnnnnnnnnnnnnnnnnnnnnnnnnnnnnnnnnnnnnnnnnnnnnnnnnnnnnnnnnnnnnnnnnnnnnnnnnnnnnnnnnnnnnnnnnnnnnnnnnnnnnnnnnnnnnnnnnnnnnnnnnnnnnnnnnnnnnnnnnnnnnnnnnnnnnnnnnnnnnnnnnnnnnnnnnnnnnnnnnnnnnnnnnnnnnnnnnnnnnnnnnnnnnnnnnnnnnnnnnnnnnnnnnnnnnnnnnnnnnnnnnnnnnnnnnnnnnnnnnnnnnnnnnnnnnnnnnnnnnnnnnnnnnnnnnnnnnnnnnnnnnnnnnnnnnnnnnnnnnnnnnnnnnnnnnnnnnnnnnnnnnnnnnnnnnnnnnnnnnnnnnnnnnnnnnnnnnnnnnnnnnnnnnnnnnnnnnnnnnnnnnnnnnnnnnnnnnnnnnnnnnnnnnnnnnnnnnnnnnnnnnnnnnnnnnnnnnnnnnnnnnnnnnnnnnnnnnnnnnnnnnnnnnnnnnnnnnnnnnnnnnnnnnnnnnnnnnnnnnnnnnnnnnnnnnnnnnnnnnnnnnnnnnnnnnnnnnnnnnnnnnnnnnnnnnnnnnnnnnnnnnnnnnnnnnnnnnnnnnnnnnnnnnnnnnnnnnnnnnnnnnnnnnnnnnnnnnnnnnnnnnnnnnnnnnnnnnnnnnnnnnnnnnnnnnnnnnnnnnnnnnnnnnnnnnnnnnnnnnnnnnnnnnnnnnnnnnnnnnnnnnnnnnnnnnnnnnnnnnnnnnnnnnnnnnnnnnnnnnnnnnnnnnnnnnnnnnnnnnnnnnnnnnnnnnnnnnnnnnnnnnnnnnnnnnnnnnnnnnnnnnnnnnnnnnnnnnnnnnnnnnnnnnnnnnnnnnnnnnnnnnnnnnnnnnnnnnnnnnnnnnnnnnnnnnnnnnnnnnnnnnnnnnnnnnnnnnnnnnnnnnnnnnnnnnnnnnnnnnnnnnnnnnnnnnnnnnnnnnnnnnnnnnnnnnnnnnnnnnnnnnnnnnnnnnnnnnnnnnnnnnnnnnnnnnnnnnnnnnnnnnnnnnnnnnnnnnnnnnnnnnnnnnnnnnnnnnnnnnnnnnnnnnnnnnnnnnnnnnnnnnnnnnnnnnnnnnnnnnnnnnnnnnnnnnnnnnnnnnnnnnnnnnnnnnnnnnnnnnnnnnnnnnnnnnnnnnnnnnnnnnnnnnnnnnnnnnnnnnnnnnnnnnnnnnnnnnnnnnnnnnnnnnnnnnnnnnnnnnnnnnnnnnnnnnnnnnnnnnnnnnnnnnnnnnnnnnnnnnnnnnnnnnnnnnnnnnnnnnnnnnnnnnnnnnnnnnnnnnnnnnnnnnnnnnnnnnnnnnnnnnnnnnnnnnnnnnnnnnnnnnnnnnnnnnnnnnnnnnnnnnnnnnnnnnnnnnnnnnnnnnnnnnnnnnnnnnnnnnnnnnnnnnnnnnnnnnnnnnnnnnnnnnnnnnnnnnnnnnnnnnnnnnnnnnnnnnnnnnnnnnnnnnnnnnnnnnnnnnnnnnnnnnnnnnnnnnnnnnnnnnnnnnnnnnnnnnnnnnnnnnnnnnnnnnnnnnnnnnnnnnnnnnnnnnnnnnnnnnnnnnnnnnnnnnnnnnnnnnnnnnnnnnnnnnnnnnnnnnnnnnnnnnnnnnnnnnnnnnnnnnnnnnnnnnnnnnnnnnnnnnnnnnnnnnnnnnnnnnnnnnnnnnnnnnnnnnnnnnnnnnnnnnnnnnnnnnnnnnnnnnnnnnnnnnnnnnnnnnnnnnnnnnnnnnnnnnnnnnnnnnnnnnnnnnnnnnnnnnnnnnnnnnnnnnnnnnnnnnnnnnnnnnnnnnnnnnnnnnnnnnnnnnnnnnnnnnnnnnnnnnnnnnnnnnnnnnnnnnnnnnnnnnnnnnnnnnnnnnnnnnnnnnnnnnnnnnnnnnnnnnnnnnnnnnnnnnnnnnnnnnnnnnnnnnnnnnnnnnnnnnnnnnnnnnnnnnnnnnnnnnnnnnnnnnnnnnnnnnnnnnnnnnnnnnnnnnnnnnnnnnnnnnnnnnnnnnnnnnnnnnnnnnnnnnnnnnnnnnnnnnnnnnnnnnnnnnnnnnnnnnnnnnnnnnnnnnnnnnnnnnnnnnnnnnnnnnnnnnnnnnnnnnnnnnnnnnnnnnnnnnnnnnnnnnnnnnnnnnnnnnnnnnnnnnnnnnnnnnnnnnnnnnnnnnnnnnnnnnnnnnnnnnnnnnnnnnnnnnnnnnnnnnnnnnnnnnnnnnnnnnnnnnnnnnnnnnnnnnnnnnnnnnnnnnnnnnnnnnnnnnnnnnnnnnnnnnnnnnnnnnnnnnnnnnnnnnnnnnnnnnnnnnnnnnnnnnnnnnnnnnnnnnnnnnnnnnnnnnnnnnnnnnnnnnnnnnnnnnnnnnnnnnnnnnnnnnnnnnnnnnnnnnnnnnnnnnnnnnnnnnnnnnnnnnnnnnnnnnnnnnnnnnnnnnnnnnnnnnnnnnnnnnnnnnnnnnnnnnnnnnnnnnnnnnnnnnnnnnnnnnnnnnnnnnnnnnnnnnnnnnnnnnnnnnnnnnnnnnnnnnnnnnnnnnnnnnnnnnnnnnnnnnnnnnnnnnnnnnnnnnnnnnnnnnnnnnnnnnnnnnnnnnnnnnnnnnnnnnnnnnnnnnnnnnnnnnnnnnnnnnnnnnnnnnnnnnnnnnnnnnnnnnnnnnnnnnnnnnnnnnnnnnnnnnnnnnnnnnnnnnnnnnnnnnnnnnnnnnnnnnnnnnnnnnnnnnnnnnnnnnnnnnnnnnnnnnnnnnnnnnnnnnnnnnnnnnnnnnnnnnnnnnnnnnnnnnnnnnnnnnnnnnnnnnnnnnnnnnnnnnnnnnnnnnnnnnnnnnnnnnnnnnnnnnnnnnnnnnnnnnnnnnnnnnnnnnnnnnnnnnnnnnnnnnnnnnnnnnnnnnnnnnnnnnnnnnnnnnnnnnnnnnnnnnnnnnnnnnnnnnnnnnnnnnnnnnnnnnnnnnnnnnnnnnnnnnnnnnnnnnnnnnnnnnnnnnnnnnnnnnnnnnnnnnnnnnnnnnnnnnnnnnnnnnnnnnnnnnnnnnnnnnnnnnnnnnnnnnnnnnnnnnnnnnnnnnnnnnnnnnnnnnnnnnnnnnnnnnnnnnnnnnnnnnnnnnnnnnnnnnnnnnnnnnnnnnnnnnnnnnnnnnnnnnnnnnnnnnnnnnnnnnnnnnnnnnnnnnnnnnnnnnnnnnnnnnnnnnnnnnnnnnnnnnnnnnnnnnnnnnnnnnnnnnnnnnnnnnnnnnnnnnnnnnnnnnnnnnnnnnnnnnnnnnnnnnnnnnnnnnnnnnnnnnnnnnnnnnnnnnnnnnnnnnnnnnnnnnnnnnnnnnnnnnnnnnnnnnnnnnnnnnnnnnnnnnnnnnnnnnnnnnnnnnnnnnnnnnnnnnnnnnnnnnnnnnnnnnnnnnnnnnnnnnnnnnnnnnnnnnnnnnnnnnnnnnnnnnnnnnnnnnnnnnnnnnnnnnnnnnnnnnnnnnnnnnnnnnnnnnnnnnnnnnnnnnnnnnnnnnnnnnnnnnnnnnnnnnnnnnnnnnnnnnnnnnnnnnnnnnnnnnnnnnnnnnnnnnnnnnnnnnnnnnnnnnnnnnnnnnnnnnnnnnnnnnnnnnnnnnnnnnnnnnnnnnnnnnnnnnnnnnnnnnnnnnnnnnnnnnnnnnnnnnnnnnnnnnnnnnnnnnnnnnnnnnnnnnnnnnnnnnnnnnnnnnnnnnnnnnnnnnnnnnnnnnnnnnnnnnnnnnnnnnnnnnnnnnnnnnnnnnnnnnnnnnnnnnnnnnnnnnnnnnnnnnnnnnnnnnnnnnnnnnnnnnnnnnnnnnnnnnnnnnnnnnnnnnnnnnnnnnnnnnnnnnnnnnnnnnnnnnnnnnnnnnnnnnnnnnnnnnnnnnnnnnnnnnnnnnnnnnnnnnnnnnnnnnnnnnnnnnnnnnnnnnnnnnnnnnnnnnnnnnnnnnnnnnnnnnnnnnnnnnnnnnnnnnnnnnnnnnnnnnnnnnnnnnnnnnnnnnnnnnnnnnnnnnnnnnnnnnnnnnnnnnnnnnnnnnnnnnnnnnnnnnnnnnnnnnnnnnnnnnnnnnnnnnnnnnnnnnnnnnnnnnnnnnnnnnnnnnnnnnnnnnnnnnnnnnnnnnnnnnnnnnnnnnnnnnnnnnnnnnnnnnnnnnnnnnnnnnnnnnnnnnnnnnnnnnnnnnnnnnnnnnnnnnnnnnnnnnnnnnnnnnnnnnnnnnnnnnnnnnnnnnnnnnnnnnnnnnnnnnnnnnnnnnnnnnnnnnnnnnnnnnnnnnnnnnnnnnnnnnnnnnnnnnnnnnnnnnnnnnnnnnnnnnnnnnnnnnnnnnnnnnnnnnnnnnnnnnnnnnnnnnnnnnnnnnnnnnnnnnnnnnnnnnnnnnnnnnnnnnnnnnnnnnnnnnnnnnnnnnnnnnnnnnnnnnnnnnnnnnnnnnnnnnnnnnnnnnnnnnnnnnnnnnnnnnnnnnnnnnnnnnnnnnnnnnnnnnnnnnnnnnnnnnnnnnnnnnnnnnnnnnnnnnnnnnnnnnnnnnnnnnnnnnnnnnnnnnnnnnnnnnnnnnnnnnnnnnnnnnnnnnnnnnnnnnnnnnnnnnnnnnnnnnnnnnnnnnnnnnnnnnnnnnnnnnnnnnnnnnnnnnnnnnnnnnnnnnnnnnnnnnnnnnnnnnnnnnnnnnnnnnnnnnnnnnnnnnnnnnnnnnnnnnnnnnnnnnnnnnnnnnnnnnnnnnnnnnnnnnnnnnnnnnnnnnnnnnnnnnnnnnnnnnnnnnnnnnnnnnnnnnnnnnnnnnnnnnnnnnnnnnnnnnnnnnnnnnnnnnnnnnnnnnnnnnnnnnnnnnnnnnnnnnnnnnnnnnnnnnnnnnnnnnnnnnnnnnnnnnnnnnnnnnnnnnnnnnnnnnnnnnnnnnnnnnnnnnnnnnnnnnnnnnnnnnnnnnnnnnnnnnnnnnnnnnnnnnnnnnnnnnnnnnnnnnnnnnnnnnnnnnnnnnnnnnnnnnnnnnnnnnnnnnnnnnnnnnnnnnnnnnnnnnnnnnnnnnnnnnnnnnnnnnnnnnnnnnnnnnnnnnnnnnnnnnnnnnnnnnnnnnnnnnnnnnnnnnnnnnnnnnnnnnnnnnnnnnnnnnnnnnnnnnnnnnnnnnnnnnnnnnnnnnnnnnnnnnnnnnnnnnnnnnnnnnnnnnnnnnnnnnnnnnnnnnnnnnnnnnnnnnnnnnnnnnnnnnnnnnnnnnnnnnnnnnnnnnnnnnnnnnnnnnnnnnnnnnnnnnnnnnnnnnnnnnnnnnnnnnnnnnnnnnnnnnnnnnnnnnnnnnnnnnnnnnnnnnnnnnnnnnnnnnnnnnnnnnnnnnnnnnnnnnnnnnnnnnnnnnnnnnnnnnnnnnnnnnnnnnnnnnnnnnnnnnnnnnnnnnnnnnnnnnnnnnnnnnnnnnnnnnnnnnnnnnnnnnnnnnnnnnnnnnnnnnnnnnnnnnnnnnnnnnnnnnnnnnnnnnnnnnnnnnnnnnnnnnnnnnnnnnnnnnnnnnnnnnnnnnnnnnnnnnnnnnnnnnnnnnnnnnnnnnnnnnnnnnnnnnnnnnnnnnnnnnnnnnnnnnnnnnnnnnnnnnnnnnnnnnnnnnnnnnnnnnnnnnnnnnnnnnnnnnnnnnnnnnnnnnnnnnnnnnnnnnnnnnnnnnnnnnnnnnnnnnnnnnnnnnnnnnnnnnnnnnnnnnnnnnnnnnnnnnnnnnnnnnnnnnnnnnnnnnnnnnnnnnnnnnnnnnnnnnnnnnnnnnnnnnnnnnnnnnnnnnnnnnnnnnnnnnnnnnnnnnnnnnnnnnnnnnnnnnnnnnnnnnnnnnnnnnnnnnnnnnnnnnnnnnnnnnnnnnnnnnnnnnnnnnnnnnnnnnnnnnnnnnnnnnnnnnnnnnnnnnnnnnnnnnnnnnnnnnnnnnnnnnnnnnnnnnnnnnnnnnnnnnnnnnnnnnnnnnnnnnnnnnnnnnnnnnnnnnnnnnnnnnnnnnnnnnnnnnnnnnnnnnnnnnnnnnnnnnnnnnnnnnnnnnnnnnnnnnnnnnnnnnnnnnnnnnnnnnnnnnnnnnnnnnnnnnnnnnnnnnnnnnnnnnnnnnnnnnnnnnnnnnnnnnnnnnnnnnnnnnnnnnnnnnnnnnnnnnnnnnnnnnnnnnnnnnnnnnnnnnnnnnnnnnnnnnnnnnnnnnnnnnnnnnnnnnnnnnnnnnnnnnnnnnnnnnnnnnnnnnnnnnnnnnnnnnnnnnnnnnnnnnnnnnnnnnnnnnnnnnnnnnnnnnnnnnnnnnnnnnnnnnnnnnnnnnnnnnnnnnnnnnnnnnnnnnnnnnnnnnnnnnnnnnnnnnnnnnnnnnnnnnnnnnnnnnnnnnnnnnnnnnnnnnnnnnnnnnnnnnnnnnnnnnnnnnnnnnnnnnnnnnnnnnnnnnnnnnnnnnnnnnnnnnnnnnnnnnnnnnnnnnnnnnnnnnnnnnnnnnnnnnnnnnnnnnnnnnnnnnnnnnnnnnnnnnnnnnnnnnnnnnnnnnnnnnnnnnnnnnnnnnnnnnnnnnnnnnnnnnnnnnnnnnnnnnnnnnnnnnnnnnnnnnnnnnnnnnnnnnnnnnnnnnnnnnnnnnnnnnnnnnnnnnnnnnnnnnnnnnnnnnnnnnnnnnnnnnnnnnnnnnnnnnnnnnnnnnnnnnnnnnnnnnnnnnnnnnnnnnnnnnnnnnnnnnnnnnnnnnnnnnnnnnnnnnnnnnnnnnnnnnnnnnnnnnnnnnnnnnnnnnnnnnnnnnnnnnnnnnnnnnnnnnnnnnnnnnnnnnnnnnnnnnnnnnnnnnnnnnnnnnnnnnnnnnnnnnnnnnnnnnnnnnnnnnnnnnnnnnnnnnnnnnnnnnnnnnnnnnnnnnnnnnnnnnnnnnnnnnnnnnnnnnnnnnnnnnnnnnnnnnnnnnnnnnnnnnnnnnnnnnnnnnnnnnnnnnnnnnnnnnnnnnnnnnnnnnnnnnnnnnnnnnnnnnnnnnnnnnnnnnnnnnnnnnnnnnnnnnnnnnnnnnnnnnnnnnnnnnnnnnnnnnnnnnnnnnnnnnnnnnnnnnnnnnnnnnnnnnnnnnnnnnnnnnnnnnnnnnnnnnnnnnnnnnnnnnnnnnnnnnnnnnnnnnnnnnnnnnnnnnnnnnnnnnnnnnnnnnnnnnnnnnnnnnnnnnnnnnnnnnnnnnnnnnnnnnnnnnnnnnnnnnnnnnnnnnnnnnnnnnnnnnnnnnnnnnnnnnnnnnnnnnnnnnnnnnnnnnnnnnnnnnnnnnnnnnnnnnnnnnnnnnnnnnnnnnnnnnnnnnnnnnnnnnnnnnnnnnnnnnnnnnnnnnnnnnnnnnnnnnnnnnnnnnnnnnnnnnnnnnnnnnnnnnnnnnnnnnnnnnnnnnnnnnnnnnnnnnnnnnnnnnnnnnnnnnnnnnnnnnnnnnnnnnnnnnnnnnnnnnnnnnnnnnnnnnnnnnnnnnnnnnnnnnnnnnnnnnnnnnnnnnnnnnnnnnnnnnnnnnnnnnnnnnnnnnnnnnnnnnnnnnnnnnnnnnnnnnnnnnnnnnnnnnnnnnnnnnnnnnnnnnnnnnnnnnnnnnnnnnnnnnnnnnnnnnnnnnnnnnnnnnnnnnnnnnnnnnnnnnnnnnnnnnnnnnnnnnnnnnnnnnnnnnnnnnnnnnnnnnnnnnnnnnnnnnnnnnnnnnnnnnnnnnnnnnnnnnnnnnnnnnnnnnnnnnnnnnnnnnnnnnnnnnnnnnnnnnnnnnnnnnnnnnnnnnnnnnnnnnnnnnnnnnnnnnnnnnnnnnnnnnnnnnnnnnnnnnnnnnnnnnnnnnnnnnnnnnnnnnnnnnnnnnnnnnnnnnnnnnnnnnnnnnnnnnnnnnnnnnnnnnnnnnnnnnnnnnnnnnnnnnnnnnnnnnnnnnnnnnnnnnnnnnnnnnnnnnnnnnnnnnnnnnnnnnnnnnnnnnnnnnnnnnnnnnnnnnnnnnnnnnnnnnnnnnnnnnnnnnnnnnnnnnnnnnnnnnnnnnnnnnnnnnnnnnnnnnnnnnnnnnnnnnnnnnnnnnnnnnnnnnnnnnnnnnnnnnnnnnnnnnnnnnnnnnnnnnnnnnnnnnnnnnnnnnnnnnnnnnnnnnnnnnnnnnnnnnnnnnnnnnnnnnnnnnnnnnnnnnnnnnnnnnnnnnnnnnnnnnnnnnnnnnnnnnnnnnnnnnnnnnnnnnnnnnnnnnnnnnnnnnnnnnnnnnnnnnnnnnnnnnnnnnnnnnnnnnnnnnnnnnnnnnnnnnnnnnnnnnnnnnnnnnnnnnnnnnnnnnnnnnnnnnnnnnnnnnnnnnnnnnnnnnnnnnnnnnnnnnnnnnnnnnnnnnnnnnnnnnnnnnnnnnnnnnnnnnnnnnnnnnnnnnnnnnnnnnnnnnnnnnnnnnnnnnnnnnnnnnnnnnnnnnnnnnnnnnnnnnnnnnnnnnnnnnnnnnnnnnnnnnnnnnnnnnnnnnnnnnnnnnnnnnnnnnnnnnnnnnnnnnnnnnnnnnnnnnnnnnnnnnnnnnnnnnnnnnnnnnnnnnnnnnnnnnnnnnnnnnnnnnnnnnnnnnnnnnnnnnnnnnnnnnnnnnnnnnnnnnnnnnnnnnnnnnnnnnnnnnnnnnnnnnnnnnnnnnnnnnnnnnnnnnnnnnnnnnnnnnnnnnnnnnnnnnnnnnnnnnnnnnnnnnnnnnnnnnnnnnnnnnnnnnnnnnnnnnnnnnnnnnnnnnnnnnnnnnnnnnnnnnnnnnnnnnnnnnnnnnnnnnnnnnnnnnnnnnnnnnnnnnnnnnnnnnnnnnnnnnnnnnnnnnnnnnnnnnnnnnnnnnnnnnnnnnnnnnnnnnnnnnnnnnnnnnnnnnnnnnnnnnnnnnnnnnnnnnnnnnnnnnnnnnnnnnnnnnnnnnnnnnnnnnnnnnnnnnnnnnnnnnnnnnnnnnnnnnnnnnnnnnnnnnnnnnnnnnnnnnnnnnnnnnnnnnnnnnnnnnnnnnnnnnnnnnnnnnnnnnnnnnnnnnnnnnnnnnnnnnnnnnnnnnnnnnnnnnnnnnnnnnnnnnnnnnnnnnnnnnnnnnnnnnnnnnnnnnnnnnnnnnnnnnnnnnnnnnnnnnnnnnnnnnnnnnnnnnnnnnnnnnnnnnnnnnnnnnnnnnnnnnnnnnnnnnnnnnnnnnnnnnnnnnnnnnnnnnnnnnnnnnnnnnnnnnnnnnnnnnnnnnnnnnnnnnnnnnnnnnnnnnnnnnnnnnnnnnnnnnnnnnnnnnnnnnnnnnnnnnnnnnnnnnnnnnnnnnnnnnnnnnnnnnnnnnnnnnnnnnnnnnnnnnnnnnnnnnnnnnnnnnnnnnnnnnnnnnnnnnnnnnnnnnnnnnnnnnnnnnnnnnnnnnnnnnnnnnnnnnnnnnnnnnnnnnnnnnnnnnnnnnnnnnnnnnnnnnnnnnnnnnnnnnnnnnnnnnnnnnnnnnnnnnnnnnnnnnnnnnnnnnnnnnnnnnnnnnnnnnnnnnnnnnnnnnnnnnnnnnnnnnnnnnnnnnnnnnnnnnnnnnnnnnnnnnnnnnnnnnnnnnnnnnnnnnnnnnnnnnnnnnnnnnnnnnnnnnnnnnnnnnnnnnnnnnnnnnnnnnnnnnnnnnnnnnnnnnnnnnnnnnnnnnnnnnnnnnnnnnnnnnnnnnnnnnnnnnnnnnnnnnnnnnnnnnnnnnnnnnnnnnnnnnnnnnnnnnnnnnnnnnnnnnnnnnnnnnnnnnnnnnnnnnnnnnnnnnnnnnnnnnnnnnnnnnnnnnnnnnnnnnnnnnnnnnnnnnnnnnnnnnnnnnnnnnnnnnnnnnnnnnnnnnnnnnnnnnnnnnnnnnnnnnnnnnnnnnnnnnnnnnnnnnnnnnnnnnnnnnnnnnnnnnnnnnnnnnnnnnnnnnnnnnnnnnnnnnnnnnnnnnnnnnnnnnnnnnnnnnnnnnnnnnnnnnnnnnnnnnnnnnnnnnnnnnnnnnnnnnnnnnnnnnnnnnnnnnnnnnnnnnnnnnnnnnnnnnnnnnnnnnnnnnnnnnnnnnnnnnnnnnnnnnnnnnnnnnnnnnnnnnnnnnnnnnnnnnnnnnnnnnnnnnnnnnnnnnnnnnnnnnnnnnnnnnnnnnnnnnnnnnnnnnnnnnnnnnnnnnnnnnnnnnnnnnnnnnnnnnnnnnnnnnnnnnnnnnnnnnnnnnnnnnnnnnnnnnnnnnnnnnnnnnnnnnnnnnnnnnnnnnnnnnnnnnnnnnnnnnnnnnnnnnnnnnnnnnnnnnnnnnnnnnnnnnnnnnnnnnnnnnnnnnnnnnnnnnnnnnnnnnnnnnnnnnnnnnnnnnnnnnnnnnnnnnnnnnnnnnnnnnnnnnnnnnnnnnnnnnnnnnnnnnnnnnnnnnnnnnnnnnnnnnnnnnnnnnnnnnnnnnnnnnnnnnnnnnnnnnnnnnnnnnnnnnnnnnnnnnnnnnnnnnnnnnnnnnnnnnnnnnnnnnnnnnnnnnnnnnnnnnnnnnnnnnnnnnnnnnnnnnnnnnnnnnnnnnnnnnnnnnnnnnnnnnnnnnnnnnnnnnnnnnnnnnnnnnnnnnnnnnnnnnnnnnnnnnnnnnnnnnnnnnnnnnnnnnnnnnnnnnnnnnnnnnnnnnnnnnnnnnnnnnnnnnnnnnnnnnnnnnnnnnnnnnnnnnnnnnnnnnnnnnnnnnnnnnnnnnnnnnnnnnnnnnnnnnnnnnnnnnnnnnnnnnnnnnnnnnnnnnnnnnnnnnnnnnnnnnnnnnnnnnnnnnnnnnnnnnnnnnnnnnnnnnnnnnnnnnnnnnnnnnnnnnnnnnnnnnnnnnnnnnnnnnnnnnnnnnnnnnnnnnnnnnnnnnnnnnnnnnnnnnnnnnnnnnnnnnnnnnnnnnnnnnnnnnnnnnnnnnnnnnnnnnnnnnnnnnnnnnnnnnnnnnnnnnnnnnnnnnnnnnnnnnnnnnnnnnnnnnnnnnnnnnnnnnnnnnnnnnnnnnnnnnnnnnnnnnnnnnnnnnnnnnnnnnnnnnnnnnnnnnnnnnnnnnnnnnnnnnnnnnnnnnnnnnnnnnnnnnnnnnnnnnnnnnnnnnnnnnnnnnnnnnnnnnnnnnnnnnnnnnnnnnnnnnnnnnnnnnnnnnnnnnnnnnnnnnnnnnnnnnnnnnnnnnnnnnnnnnnnnnnnnnnnnnnnnnnnnnnnnnnnnnnnnnnnnnnnnnnnnnnnnnnnnnnnnnnnnnnnnnnnnnnnnnnnnnnnnnnnnnnnnnnnnnnnnnnnnnnnnnnnnnnnnnnnnnnnnnnnnnnnnnnnnnnnnnnnnnnnnnnnnnnnnnnnnnnnnnnnnnnnnnnnnnnnnnnnnnnnnnnnnnnnnnnnnnnnnnnnnnnnnnnnnnnnnnnnnnnnnnnnnnnnnnnnnnnnnnnnnnnnnnnnnnnnnnnnnnnnnnnnnnnnnnnnnnnnnnnnnnnnnnnnnnnnnnnnnnnnnnnnnnnnnnnnnnnnnnnnnnnnnnnnnnnnnnnnnnnnnnnnnnnnnnnnnnnnnnnnnnnnnnnnnnnnnnnnnnnnnnnnnnnnnnnnnnnnnnnnnnnnnnnnnnnnnnnnnnnnnnnnnnnnnnnnnnnnnnnnnnnnnnnnnnnnnnnnnnnnnnnnnnnnnnnnnnnnnnnnnnnnnnnnnnnnnnnnnnnnnnnnnnnnnnnnnnnnnnnnnnnnnnnnnnnnnnnnnnnnnnnnnnnnnnnnnnnnnnnnnnnnnnnnnnnnnnnnnnnnnnnnnnnnnnnnnnnnnnnnnnnnnnnnnnnnnnnnnnnnnnnnnnnnnnnnnnnnnnnnnnnnnnnnnnnnnnnnnnnnnnnnnnnnnnnnnnnnnnnnnnnnnnnnnnnnnnnnnnnnnnnnnnnnnnnnnnnnnnnnnnnnnnnnnnnnnnnnnnnnnnnnnnnnnnnnnnnnnnnnnnnnnnnnnnnnnnnnnnnnnnnnnnnnnnnnnnnnnnnnnnnnnnnnnnnnnnnnnnnnnnnnnnnnnnnnnnnnnnnnnnnnnnnnnnnnnnnnnnnnnnnnnnnnnnnnnnnnnnnnnnnnnnnnnnnnnnnnnnnnnnnnnnnnnnnnnnnnnnnnnnnnnnnnnnnnnnnnnnnnnnnnnnnnnnnnnnnnnnnnnnnnnnnnnnnnnnnnnnnnnnnnnnnnnnnnnnnnnnnnnnnnnnnnnnnnnnnnnnnnnnnnnnnnnnnnnnnnnnnnnnnnnnnnnnnnnnnnnnnnnnnnnnnnnnnnnnnnnnnnnnnnnnnnnnnnnnnnnnnnnnnnnnnnnnnnnnnnnnnnnnnnnnnnnnnnnnnnnnnnnnnnnnnnnnnnnnnnnnnnnnnnnnnnnnnnnnnnnnnnnnnnnnnnnnnnnnnnnnnnnnnnnnnnnnnnnnnnnnnnnnnnnnnnnnnnnnnnnnnnnnnnnnnnnnnnnnnnnnnnnnnnnnnnnnnnnnnnnnnnnnnnnnnnnnnnnnnnnnnnnnnnnnnnnnnnnnnnnnnnnnnnnnnnnnnnnnnnnnnnnnnnnnnnnnnnnnnnnnnnnnnnnnnnnnnnnnnnnnnnnnnnnnnnnnnnnnnnnnnnnnnnnnnnnnnnnnnnnnnnnnnnnnnnnnnnnnnnnnnnnnnnnnnnnnnnnnnnnnnnnnnnnnnnnnnnnnnnnnnnnnnnnnnnnnnnnnnnnnnnnnnnnnnnnnnnnnnnnnnnnnnnnnnnnnnnnnnnnnnnnnnnnnnnnnnnnnnnnnnnnnnnnnnnnnnnnnnnnnnnnnnnnnnnnnnnnnnnnnnnnnnnnnnnnnnnnnnnnnnnnnnnnnnnnnnnnnnnnnnnnnnnnnnnnnnnnnnnnnnnnnnnnnnnnnnnnnnnnnnnnnnnnnnnnnnnnnnnnnnnnnnnnnnnnnnnnnnnnnnnnnnnnnnnnnnnnnnnnnnnnnnnnnnnnnnnnnnnnnnnnnnnnnnnnnnnnnnnnnnnnnnnnnnnnnnnnnnnnnnnnnnnnnnnnnnnnnnnnnnnnnnnnnnnnnnnnnnnnnnnnnnnnnnnnnnnnnnnnnnnnnnnnnnnnnnnnnnnnnnnnnnnnnnnnnnnnnnnnnnnnnnnnnnnnnnnnnnnnnnnnnnnnnnnnnnnnnnnnnnnnnnnnnnnnnnnnnnnnnnnnnnnnnnnnnnnnnnnnnnnnnnnnnnnnnnnnnnnnnnnnnnnnnnnnnnnnnnnnnnnnnnnnnnnnnnnnnnnnnnnnnnnnnnnnnnnnnnnnnnnnnnnnnnnnnnnnnnnnnnnnnnnnnnnnnnnnnnnnnnnnnnnnnnnnnnnnnnnnnnnnnnnnnnnnnnnnnnnnnnnnnnnnnnnnnnnnnnnnnnnnnnnnnnnnnnnnnnnnnnnnnnnnnnnnnnnnnnnnnnnnnnnnnnnnnnnnnnnnnnnnnnnnnnnnnnnnnnnnnnnnnnnnnnnnnnnnnnnnnnnnnnnnnnnnnnnnnnnnnnnnnnnnnnnnnnnnnnnnnnnnnnnnnnnnnnnnnnnnnnnnnnnnnnnnnnnnnnnnnnnnnnnnnnnnnnnnnnnnnnnnnnnnnnnnnnnnnnnnnnnnnnnnnnnnnnnnnnnnnnnnnnnnnnnnnnnnnnnnnnnnnnnnnnnnnnnnnnnnnnnnnnnnnnnnnnnnnnnnnnnnnnnnnnnnnnnnnnnnnnnnnnnnnnnnnnnnnnnnnnnnnnnnnnnnnnnnnnnnnnnnnnnnnnnnnnnnnnnnnnnnnnnnnnnnnnnnnnnnnnnnnnnnnnnnnnnnnnnnnnnnnnnnnnnnnnnnnnnnnnnnnnnnnnnnnnnnnnnnnnnnnnnnnnnnnnnnnnnnnnnnnnnnnnnnnnnnnnnnnnnnnnnnnnnnnnnnnnnnnnnnnnnnnnnnnnnnnnnnnnnnnnnnnnnnnnnnnnnnnnnnnnnnnnnnnnnnnnnnnnnnnnnnnnnnnnnnnnnnnnnnnnnnnnnnnnnnnnnnnnnnnnnnnnnnnnnnnnnnnnnnnnnnnnnnnnnnnnnnnnnnnnnnnnnnnnnnnnnnnnnnnnnnnnnnnnnnnnnnnnnnnnnnnnnnnnnnnnnnnnnnnnnnnnnnnnnnnnnnnnnnnnnnnnnnnnnnnnnnnnnnnnnnnnnnnnnnnnnnnnnnnnnnnnnnnnnnnnnnnnnnnnnnnnnnnnnnnnnnnnnnnnnnnnnnnnnnnnnnnnnnnnnnnnnnnnnnnnnnnnnnnnnnnnnnnnnnnnnnnnnnnnnnnnnnnnnnnnnnnnnnnnnnnnnnnnnnnnnnnnnnnnnnnnnnnnnnnnnnnnnnnnnnnnnnnnnnnnnnnnnnnnnnnnnnnnnnnnnnnnnnnnnnnnnnnnnnnnnnnnnnnnnnnnnnnnnnnnnnnnnnnnnnnnnnnnnnnnnnnnnnnnnnnnnnnnnnnnnnnnnnnnnnnnnnnnnnnnnnnnnnnnnnnnnnnnnnnnnnnnnnnnnnnnnnnnnnnnnnnnnnnnnnnnnnnnnnnnnnnnnnnnnnnnnnnnnnnnnnnnnnnnnnnnnnnnnnnnnnnnnnnnnnnnnnnnnnnnnnnnnnnnnnnnnnnnnnnnnnnnnnnnnnnnnnnnnnnnnnnnnnnnnnnnnnnnnnnnnnnnnnnnnnnnnnnnnnnnnnnnnnnnnnnnnnnnnnnnnnnnnnnnnnnnnnnnnnnnnnnnnnnnnnnnnnnnnnnnnnnnnnnnnnnnnnnnnnnnnnnnnnnnnnnnnnnnnnnnnnnnnnnnnnnnnnnnnnnnnnnnnnnnnnnnnnnnnnnnnnnnnnnnnnnnnnnnnnnnnnnnnnnnnnnnnnnnnnnnnnnnnnnnnnnnnnnnnnnnnnnnnnnnnnnnnnnnnnnnnnnnnnnnnnnnnnnnnnnnnnnnnnnnnnnnnnnnnnnnnnnnnnnnnnnnnnnnnnnnnnnnnnnnnnnnnnnnnnnnnnnnnnnnnnnnnnnnnnnnnnnnnnnnnnnnnnnnnnnnnnnnnnnnnnnnnnnnnnnnnnnnnnnnnnnnnnnnnnnnnnnnnnnnnnnnnnnnnnnnnnnnnnnnnnnnnnnnnnnnnnnnnnnnnnnnnnnnnnnnnnnnnnnnnnnnnnnnnnnnnnnnnnnnnnnnnnnnnnnnnnnnnnnnnnnnnnnnnnnnnnnnnnnnnnnnnnnnnnnnnnnnnnnnnnnnnnnnnnnnnnnnnnnnnnnnnnnnnnnnnnnnnnnnnnnnnnnnnnnnnnnnnnnnnnnnnnnnnnnnnnnnnnnnnnnnnnnnnnnnnnnnnnnnnnnnnnnnnnnnnnnnnnnnnnnnnnnnnnnnnnnnnnnnnnnnnnnnnnnnnnnnnnnnnnnnnnnnnnnnnnnnnnnnnnnnnnnnnnnnnnnnnnnnnnnnnnnnnnnnnnnnnnnnnnnnnnnnnnnnnnnnnnnnnnnnnnnnnnnnnnnnnnnnnnnnnnnnnnnnnnnnnnnnnnnnnnnnnnnnnnnnnnnnnnnnnnnnnnnnnnnnnnnnnnnnnnnnnnnnnnnnnnnnnnnnnnnnnnnnnnnnnnnnnnnnnnnnnnnnnnnnnnnnnnnnnnnnnnnnnnnnnnnnnnnnnnnnnnnnnnnnnnnnnnnnnnnnnnnnnnnnnnnnnnnnnnnnnnnnnnnnnnnnnnnnnnnnnnnnnnnnnnnnnnnnnnnnnnnnnnnnnnnnnnnnnnnnnnnnnnnnnnnnnnnnnnnnnnnnnnnnnnnnnnnnnnnnnnnnnnnnnnnnnnnnnnnnnnnnnnnnnnnnnnnnnnnnnnnnnnnnnnnnnnnnnnnnnnnnnnnnnnnnnnnnnnnnnnnnnnnnnnnnnnnnnnnnnnnnnnnnnnnnnnnnnnnnnnnnnnnnnnnnnnnnnnnnnnnnnnnnnnnnnnnnnnnnnnnnnnnnnnnnnnnnnnnnnnnnnnnnnnnnnnnnnnnnnnnnnnnnnnnnnnnnnnnnnnnnnnnnnnnnnnnnnnnnnnnnnnnnnnnnnnnnnnnnnnnnnnnnnnnnnnnnnnnnnnnnnnnnnnnnnnnnnnnnnnnnnnnnnnnnnnnnnnnnnnnnnnnnnnnnnnnnnnnnnnnnnnnnnnnnnnnnnnnnnnnnnnnnnnnnnnnnnnnnnnnnnnnnnnnnnnnnnnnnnnnnnnnnnnnnnnnnnnnnnnnnnnnnnnnnnnnnnnnnnnnnnnnnnnnnnnnnnnnnnnnnnnnnnnnnnnnnnnnnnnnnnnnnnnnnnnnnnnnnnnnnnnnnnnnnnnnnnnnnnnnnnnnnnnnnnnnnnnnnnnnnnnnnnnnnnnnnnnnnnnnnnnnnnnnnnnnnnnnnnnnnnnnnnnnnnnnnnnnnnnnnnnnnnnnnnnnnnnnnnnnnnnnnnnnnnnnnnnnnnnnnnnnnnnnnnnnnnnnnnnnnnnnnnnnnnnnnnnnnnnnnnnnnnnnnnnnnnnnnnnnnnnnnnnnnnnnnnnnnnnnnnnnnnnnnnnnnnnnnnnnnnnnnnnnnnnnnnnnnnnnnnnnnnnnnnnnnnnnnnnnnnnnnnnnnnnnnnnnnnnnnnnnnnnnnnnnnnnnnnnnnnnnnnnnnnnnnnnnnnnnnnnnnnnnnnnnnnnnnnnnnnnnnnnnnnnnnnnnnnnnnnnnnnnnnnnnnnnnnnnnnnnnnnnnnnnnnnnnnnnnnnnnnnnnnnnnnnnnnnnnnnnnnnnnnnnnnnnnnnnnnnnnnnnnnnnnnnnnnnnnnnnnnnnnnnnnnnnnnnnnnnnnnnnnnnnnnnnnnnnnnnnnnnnnnnnnnnnnnnnnnnnnnnnnnnnnnnnnnnnnnnnnnnnnnnnnnnnnnnnnnnnnnnnnnnnnnnnnnnnnnnnnnnnnnnnnnnnnnnnnnnnnnnnnnnnnnnnnnnnnnnnnnnnnnnnnnnnnnnnnnnnnnnnnnnnnnnnnnnnnnnnnnnnnnnnnnnnnnnnnnnnnnnnnnnnnnnnnnnnnnnnnnnnnnnnnnnnnnnnnnnnnnnnnnnnnnnnnnnnnnnnnnnnnnnnnnnnnnnnnnnnnnnnnnnnnnnnnnnnnnnnnnnnnnnnnnnnnnnnnnnnnnnnnnnnnnnnnnnnnnnnnnnnnnnnnnnnnnnnnnnnnnnnnnnnnnnnnnnnnnnnnnnnnnnnnnnnnnnnnnnnnnnnnnnnnnnnnnnnnnnnnnnnnnnnnnnnnnnnnnnnnnnnnnnnnnnnnnnnnnnnnnnnnnnnnnnnnnnnnnnnnnnnnnnnnnnnnnnnnnnnnnnnnnnnnnnnnnnnnnnnnnnnnnnnnnnnnnnnnnnnnnnnnnnnnnnnnnnnnnnnnnnnnnnnnnnnnnnnnnnnnnnnnnnnnnnnnnnnnnnnnnnnnnnnnnnnnnnnnnnnnnnnnnnnnnnnnnnnnnnnnnnnnnnnnnnnnnnnnnnnnnnnnnnnnnnnnnnnnnnnnnnnnnnnnnnnnnnnnnnnnnnnnnnnnnnnnnnnnnnnnnnnnnnnnnnnnnnnnnnnnnnnnnnnnnnnnnnnnnnnnnnnnnnnnnnnnnnnnnnnnnnnnnnnnnnnnnnnnnnnnnnnnnnnnnnnnnnnnnnnnnnnnnnnnnnnnnnnnnnnnnnnnnnnnnnnnnnnnnnnnnnnnnnnnnnnnnnnnnnnnnnnnnnnnnnnnnnnnnnnnnnnnnnnnnnnnnnnnnnnnnnnnnnnnnnnnnnnnnnnnnnnnnnnnnnnnnnnnnnnnnnnnnnnnnnnnnnnnnnnnnnnnnnnnnnnnnnnnnnnnnnnnnnnnnnnnnnnnnnnnnnnnnnnnnnnnnnnnnnnnnnnnnnnnnnnnnnnnnnnnnnnnnnnnnnnnnnnnnnnnnnnnnnnnnnnnnnnnnnnnnnnnnnnnnnnnnnnnnnnnnnnnnnnnnnnnnnnnnnnnnnnnnnnnnnnnnnnnnnnnnnnnnnnnnnnnnnnnnnnnnnnnnnnnnnnnnnnnnnnnnnnnnnnnnnnnnnnnnnnnnnnnnnnnnnnnnnnnnnnnnnnnnnnnnnnnnnnnnnnnnnnnnnnnnnnnnnnnnnnnnnnnnnnnnnnnnnnnnnnnnnnnnnnnnnnnnnnnnnnnnnnnnnnnnnnnnnnnnnnnnnnnnnnnnnnnnnnnnnnnnnnnnnnnnnnnnnnnnnnnnnnnnnnnnnnnnnnnnnnnnnnnnnnnnnnnnnnnnnnnnnnnnnnnnnnnnnnnnnnnnnnnnnnnnnnnnnnnnnnnnnnnnnnnnnnnnnnnnnnnnnnnnnnnnnnnnnnnnnnnnnnnnnnnnnnnnnnnnnnnnnnnnnnnnnnnnnnnnnnnnnnnnnnnnnnnnnnnnnnnnnnnnnnnnnnnnnnnnnnnnnnnnnnnnnnnnnnnnnnnnnnnnnnnnnnnnnnnnnnnnnnnnnnnnnnnnnnnnnnnnnnnnnnnnnnnnnnnnnnnnnnnnnnnnnnnnnnnnnnnnnnnnnnnnnnnnnnnnnnnnnnnnnnnnnnnnnnnnnnnnnnnnnnnnnnnnnnnnnnnnnnnnnnnnnnnnnnnnnnnnnnnnnnnnnnnnnnnnnnnnnnnnnnnnnnnnnnnnnnnnnnnnnnnnnnnnnnnnnnnnnnnnnnnnnnnnnnnnnnnnnnnnnnnnnnnnnnnnnnnnnnnnnnnnnnnnnnnnnnnnnnnnnnnnnnnnnnnnnnnnnnnnnnnnnnnnnnnnnnnnnnnnnnnnnnnnnnnnnnnnnnnnnnnnnnnnnnnnnnnnnnnnnnnnnnnnnnnnnnnnnnnnnnnnnnnnnnnnnnnnnnnnnnnnnnnnnnnnnnnnnnnnnnnnnnnnnnnnnnnnnnnnnnnnnnnnnnnnnnnnnnnnnnnnnnnnnnnnnnnnnnnnnnnnnnnnnnnnnnnnnnnnnnnnnnnnnnnnnnnnnnnnnnnnnnnnnnnnnnnnnnnnnnnnnnnnnnnnnnnnnnnnnnnnnnnnnnnnnnnnnnnnnnnnnnnnnnnnnnnnnnnnnnnnnnnnnnnnnnnnnnnnnnnnnnnnnnnnnnnnnnnnnnnnnnnnnnnnnnnnnnnnnnnnnnnnnnnnnnnnnnnnnnnnnnnnnnnnnnnnnnnnnnnnnnnnnnnnnnnnnnnnnnnnnnnnnnnnnnnnnnnnnnnnnnnnnnnnnnnnnnnnnnnnnnnnnnnnnnnnnnnnnnnnnnnnnnnnnnnnnnnnnnnnnnnnnnnnnnnnnnnnnnnnnnnnnnnnnnnnnnnnnnnnnnnnnnnnnnnnnnnnnnnnnnnnnnnnnnnnnnnnnnnnnnnnnnnnnnnnnnnnnnnnnnnnnnnnnnnnnnnnnnnnnnnnnnnnnnnnnnnnnnnnnnnnnnnnnnnnnnnnnnnnnnnnnnnnnnnnnnnnnnnnnnnnnnnnnnnnnnnnnnnnnnnnnnnnnnnnnnnnnnnnnnnnnnnnnnnnnnnnnnnnnnnnnnnnnnnnnnnnnnnnnnnnnnnnnnnnnnnnnnnnnnnnnnnnnnnnnnnnnnnnnnnnnnnnnnnnnnnnnnnnnnnnnnnnnnnnnnnnnnnnnnnnnnnnnnnnnnnnnnnnnnnnnnnnnnnnnnnnnnnnnnnnnnnnnnnnnnnnnnnnnnnnnnnnnnnnnnnnnnnnnnnnnnnnnnnnnnnnnnnnnnnnnnnnnnnnnnnnnnnnnnnnnnnnnnnnnnnnnnnnnnnnnnnnnnnnnnnnnnnnnnnnnnnnnnnnnnnnnnnnnnnnnnnnnnnnnnnnnnnnnnnnnnnnnnnnnnnnnnnnnnnnnnnnnnnnnnnnnnnnnnnnnnnnnnnnnnnnnnnnnnnnnnnnnnnnnnnnnnnnnnnnnnnnnnnnnnnnnnnnnnnnnnnnnnnnnnnnnnnnnnnnnnnnnnnnnnnnnnnnnnnnnnnnnnnnnnnnnnnnnnnnnnnnnnnnnnnnnnnnnnnnnnnnnnnnnnnnnnnnnnnnnnnnnnnnnnnnnnnnnnnnnnnnnnnnnnnnnnnnnnnnnnnnnnnnnnnnnnnnnnnnnnnnnnnnnnnnnnnnnnnnnnnnnnnnnnnnnnnnnnnnnnnnnnnnnnnnnnnnnnnnnnnnnnnnnnnnnnnnnnnnnnnnnnnnnnnnnnnnnnnnnnnnnnnnnnnnnnnnnnnnnnnnnnnnnnnnnnnnnnnnnnnnnnnnnnnnnnnnnnnnnnnnnnnnnnnnnnnnnnnnnnnnnnnnnnnnnnnnnnnnnnnnnnnnnnnnnnnnnnnnnnnnnnnnnnnnnnnnnnnnnnnnnnnnnnnnnnnnnnnnnnnnnnnnnnnnnnnnnnnnnnnnnnnnnnnnnnnnnnnnnnnnnnnnnnnnnnnnnnnnnnnnnnnnnnnnnnnnnnnnnnnnnnnnnnnnnnnnnnnnnnnnnnnnnnnnnnnnnnnnnnnnnnnnnnnnnnnnnnnnnnnnnnnnnnnnnnnnnnnnnnnnnnnnnnnnnnnnnnnnnnnnnnnnnnnnnnnnnnnnnnnnnnnnnnnnnnnnnnnnnnnnnnnnnnnnnnnnnnnnnnnnnnnnnnnnnnnnnnnnnnnnnnnnnnnnnnnnnnnnnnnnnnnnnnnnnnnnnnnnnnnnnnnnnnnnnnnnnnnnnnnnnnnnnnnnnnnnnnnnnnnnnnnnnnnnnnnnnnnnnnnnnnnnnnnnnnnnnnnnnnnnnnnnnnnnnnnnnnnnnnnnnnnnnnnnnnnnnnnnnnnnnnnnnnnnnnnnnnnnnnnnnnnnnnnnnnnnnnnnnnnnnnnnnnnnnnnnnnnnnnnnnnnnnnnnnnnnnnnnnnnnnnnnnnnnnnnnnnnnnnnnnnnnnnnnnnnnnnnnnnnnnnnnnnnnnnnnnnnnnnnnnnnnnnnnnnnnnnnnnnnnnnnnnnnnnnnnnnnnnnnnnnnnnnnnnnnnnnnnnnnnnnnnnnnnnnnnnnnnnnnnnnnnnnnnnnnnnnnnnnnnnnnnnnnnnnnnnnnnnnnnnnnnnnnnnnnnnnnnnnnnnnnnnnnnnnnnnnnnnnnnnnnnnnnnnnnnnnnnnnnnnnnnnnnnnnnnnnnnnnnnnnnnnnnnnnnnnnnnnnnnnnnnnnnnnnnnnnnnnnnnnnnnnnnnnnnnnnnnnnnnnnnnnnnnnnnnnnnnnnnnnnnnnnnnnnnnnnnnnnnnnnnnnnnnnnnnnnnnnnnnnnnnnnnnnnnnnnnnnnnnnnnnnnnnnnnnnnnnnnnnnnnnnnnnnnnnnnnnnnnnnnnnnnnnnnnnnnnnnnnnnnnnnnnnnnnnnnnnnnnnnnnnnnnnnnnnnnnnnnnnnnnnnnnnnnnnnnnnnnnnnnnnnnnnnnnnnnnnnnnnnnnnnnnnnnnnnnnnnnnnnnnnnnnnnnnnnnnnnnnnnnnnnnnnnnnnnnnnnnnnnnnnnnnnnnnnnnnnnnnnnnnnnnnnnnnnnnnnnnnnnnnnnnnnnnnnnnnnnnnnnnnnnnnnnnnnnnnnnnnnnnnnnnnnnnnnnnnnnnnnnnnnnnnnnnnnnnnnnnnnnnnnnnnnnnnnnnnnnnnnnnnnnnnnnnnnnnnnnnnnnnnnnnnnnnnnnnnnnnnnnnnnnnnnnnnnnnnnnnnnnnnnnnnnnnnnnnnnnnnnnnnnnnnnnnnnnnnnnnnnnnnnnnnnnnnnnnnnnnnnnnnnnnnnnnnnnnnnnnnnnnnnnnnnnnnnnnnnnnnnnnnnnnnnnnnnnnnnnnnnnnnnnnnnnnnnnnnnnnnnnnnnnnnnnnnnnnnnnnnnnnnnnnnnnnnnnnnnnnnnnnnnnnnnnnnnnnnnnnnnnnnnnnnnnnnnnnnnnnnnnnnnnnnnnnnnnnnnnnnnnnnnnnnnnnnnnnnnnnnnnnnnnnnnnnnnnnnnnnnnnnnnnnnnnnnnnnnnnnnnnnnnnnnnnnnnnnnnnnnnnnnnnnnnnnnnnnnnnnnnnnnnnnnnnnnnnnnnnnnnnnnnnnnnnnnnnnnnnnnnnnnnnnnnnnnnnnnnnnnnnnnnnnnnnnnnnnnnnnnnnnnnnnnnnnnnnnnnnnnnnnnnnnnnnnnnnnnnnnnnnnnnnnnnnnnnnnnnnnnnnnnnnnnnnnnnnnnnnnnnnnnnnnnnnnnnnnnnnnnnnnnnnnnnnnnnnnnnnnnnnnnnnnnnnnnnnnnnnnnnnnnnnnnnnnnnnnnnnnnnnnnnnnnnnnnnnnnnnnnnnnnnnnnnnnnnnnnnnnnnnnnnnnnnnnnnnnnnnnnnnnnnnnnnnnnnnnnnnnnnnnnnnnnnnnnnnnnnnnnnnnnnnnnnnnnnnnnnnnnnnnnnnnnnnnnnnnnnnnnnnnnnnnnnnnnnnnnnnnnnnnnnnnnnnnnnnnnnnnnnnnnnnnnnnnnnnnnnnnnnnnnnnnnnnnnnnnnnnnnnnnnnnnnnnnnnnnnnnnnnnnnnnnnnnnnnnnnnnnnnnnnnnnnnnnnnnnnnnnnnnnnnnnnnnnnnnnnnnnnnnnnnnnnnnnnnnnnnnnnnnnnnnnnnnnnnnnnnnnnnnnnnnnnnnnnnnnnnnnnnnnnnnnnnnnnnnnnnnnnnnnnnnnnnnnnnnnnnnnnnnnnnnnnnnnnnnnnnnnnnnnnnnnnnnnnnnnnnnnnnnnnnnnnnnnnnnnnnnnnnnnnnnnnnnnnnnnnnnnnnnnnnnnnnnnnnnnnnnnnnnnnnnnnnnnnnnnnnnnnnnnnnnnnnnnnnnnnnnnnnnnnnnnnnnnnnnnnnnnnnnnnnnnnnnnnnnnnnnnnnnnnnnnnnnnnnnnnnnnnnnnnnnnnnnnnnnnnnnnnnnnnnnnnnnnnnnnnnnnnnnnnnnnnnnnnnnnnnnnnnnnnnnnnnnnnnnnnnnnnnnnnnnnnnnnnnnnnnnnnnnnnnnnnnnnnnnnnnnnnnnnnnnnnnnnnnnnnnnnnnnnnnnnnnnnnnnnnnnnnnnnnnnnnnnnnnnnnnnnnnnnnnnnnnnnnnnnnnnnnnnnnnnnnnnnnnnnnnnnnnnnnnnnnnnnnnnnnnnnnnnnnnnnnnnnnnnnnnnnnnnnnnnnnnnnnnnnnnnnnnnnnnnnnnnnnnnnnnnnnnnnnnnnnnnnnnnnnnnnnnnnnnnnnnnnnnnnnnnnnnnnnnnnnnnnnnnnnnnnnnnnnnnnnnnnnnnnnnnnnnnnnnnnnnnnnnnnnnnnnnnnnnnnnnnnnnnnnnnnnnnnnnnnnnnnnnnnnnnnnnnnnnnnnnnnnnnnnnnnnnnnnnnnnnnnnnnnnnnnnnnnnnnnnnnnnnnnnnnnnnnnnnnnnnnnnnnnnnnnnnnnnnnnnnnnnnnnnnnnnnnnnnnnnnnnnnnnnnnnnnnnnnnnnnnnnnnnnnnnnnnnnnnnnnnnnnnnnnnnnnnnnnnnnnnnnnnnnnnnnnnnnnnnnnnnnnnnnnnnnnnnnnnnnnnnnnnnnnnnnnnnnnnnnnnnnnnnnnnnnnnnnnnnnnnnnnnnnnnnnnnnnnnnnnnnnnnnnnnnnnnnnnnnnnnnnnnnnnnnnnnnnnnnnnnnnnnnnnnnnnnnnnnnnnnnnnnnnnnnnnnnnnnnnnnnnnnnnnnnnnnnnnnnnnnnnnnnnnnnnnnnnnnnnnnnnnnnnnnnnnnnnnnnnnnnnnnnnnnnnnnnnnnnnnnnnnnnnnnnnnnnnnnnnnnnnnnnnnnnnnnnnnnnnnnnnnnnnnnnnnnnnnnnnnnnnnnnnnnnnnnnnnnnnnnnnnnnnnnnnnnnnnnnnnnnnnnnnnnnnnnnnnnnnnnnnnnnnnnnnnnnnnnnnnnnnnnnnnnnnnnnnnnnnnnnnnnnnnnnnnnnnnnnnnnnnnnnnnnnnnnnnnnnnnnnnnnnnnnnnnnnnnnnnnnnnnnnnnnnnnnnnnnnnnnnnnnnnnnnnnnnnnnnnnnnnnnnnnnnnnnnnnnnnnnnnnnnnnnnnnnnnnnnnnnnnnnnnnnnnnnnnnnnnnnnnnnnnnnnnnnnnnnnnnnnnnnnnnnnnnnnnnnnnnnnnnnnnnnnnnnnnnnnnnnnnnnnnnnnnnnnnnnnnnnnnnnnnnnnnnnnnnnnnnnnnnnnnnnnnnnnnnnnnnnnnnnnnnnnnnnnnnnnnnnnnnnnnnnnnnnnnnnnnnnnnnnnnnnnnnnnnnnnnnnnnnnnnnnnnnnnnnnnnnnnnnnnnnnnnnnnnnnnnnnnnnnnnnnnnnnnnnnnnnnnnnnnnnnnnnnnnnnnnnnnnnnnnnnnnnnnnnnnnnnnnnnnnnnnnnnnnnnnnnnnnnnnnnnnnnnnnnnnnnnnnnnnnnnnnnnnnnnnnnnnnnnnnnnnnnnnnnnnnnnnnnnnnnnnnnnnnnnnnnnnnnnnnnnnnnnnnnnnnnnnnnnnnnnnnnnnnnnnnnnnnnnnnnnnnnnnnnnnnnnnnnnnnnnnnnnnnnnnnnnnnnnnnnnnnnnnnnnnnnnnnnnnnnnnnnnnnnnnnnnnnnnnnnnnnnnnnnnnnnnnnnnnnnnnnnnnnnnnnnnnnnnnnnnnnnnnnnnnnnnnnnnnnnnnnnnnnnnnnnnnnnnnnnnnnnnnnnnnnnnnnnnnnnnnnnnnnnnnnnnnnnnnnnnnnnnnnnnnnnnnnnnnnnnnnnnnnnnnnnnnnnnnnnnnnnnnnnnnnnnnnnnnnnnnnnnnnnnnnnnnnnnnnnnnnnnnnnnnnnnnnnnnnnnnnnnnnnnnnnnnnnnnnnnnnnnnnnnnnnnnnnnnnnnnnnnnnnnnnnnnnnnnnnnnnnnnnnnnnnnnnnnnnnnnnnnnnnnnnnnnnnnnnnnnnnnnnnnnnnnnnnnnnnnnnnnnnnnnnnnnnnnnnnnnnnnnnnnnnnnnnnnnnnnnnnnnnnnnnnnnnnnnnnnnnnnnnnnnnnnnnnnnnnnnnnnnnnnnnnnnnnnnnnnnnnnnnnnnnnnnnnnnnnnnnnnnnnnnnnnnnnnnnnnnnnnnnnnnnnnnnnnnnnnnnnnnnnnnnnnnnnnnnnnnnnnnnnnnnnnnnnnnnnnnnnnnnnnnnnnnnnnnnnnnnnnnnnnnnnnnnnnnnnnnnnnnnnnnnnnnnnnnnnnnnnnnnnnnnnnnnnnnnnnnnnnnnnnnnnnnnnnnnnnnnnnnnnnnnnnnnnnnnnnnnnnnnnnnnnnnnnnnnnnnnnnnnnnnnnnnnnnnnnnnnnnnnnnnnnnnnnnnnnnnnnnnnnnnnnnnnnnnnnnnnnnnnnnnnnnnnnnnnnnnnnnnnnnnnnnnnnnnnnnnnnnnnnnnnnnnnnnnnnnnnnnnnnnnnnnnnnnnnnnnnnnnnnnnnnnnnnnnnnnnnnnnnnnnnnnnnnnnnnnnnnnnnnnnnnnnnnnnnnnnnnnnnnnnnnnnnnnnnnnnnnnnnnnnnnnnnnnnnnnnnnnnnnnnnnnnnnnnnnnnnnnnnnnnnnnnnnnnnnnnnnnnnnnnnnnnnnnnnnnnnnnnnnnnnnnnnnnnnnnnnnnnnnnnnnnnnnnnnnnnnnnnnnnnnnnnnnnnnnnnnnnnnnnnnnnnnnnnnnnnnnnnnnnnnnnnnnnnnnnnnnnnnnnnnnnnnnnnnnnnnnnnnnnnnnnnnnnnnnnnnnnnnnnnnnnnnnnnnnnnnnnnnnnnnnnnnnnnnnnnnnnnnnnnnnnnnnnnnnnnnnnnnnnnnnnnnnnnnnnnnnnnnnnnnnnnnnnnnnnnnnnnnnnnnnnnnnnnnnnnnnnnnnnnnnnnnnnnnnnnnnnnnnnnnnnnnnnnnnnnnnnnnnnnnnnnnnnnnnnnnnnnnnnnnnnnnnnnnnnnnnnnnnnnnnnnnnnnnnnnnnnnnnnnnnnnnnnnnnnnnnnnnnnnnnnnnnnnnnnnnnnnnnnnnnnnnnnnnnnnnnnnnnnnnnnnnnnnnnnnnnnnnnnnnnnnnnnnnnnnnnnnnnnnnnnnnnnnnnnnnnnnnnnnnnnnnnnnnnnnnnnnnnnnnnnnnnnnnnnnnnnnnnnnnnnnnnnnnnnnnnnnnnnnnnnnnnnnnnnnnnnnnnnnnnnnnnnnnnnnnnnnnnnnnnnnnnnnnnnnnnnnnnnnnnnnnnnnnnnnnnnnnnnnnnnnnnnnnnnnnnnnnnnnnnnnnnnnnnnnnnnnnnnnnnnnnnnnnnnnnnnnnnnnnnnnnnnnnnnnnnnnnnnnnnnnnnnnnnnnnnnnnnnnnnnnnnnnnnnnnnnnnnnnnnnnnnnnnnnnnnnnnnnnnnnnnnnnnnnnnnnnnnnnnnnnnnnnnnnnnnnnnnnnnnnnnnnnnnnnnnnnnnnnnnnnnnnnnnnnnnnnnnnnnnnnnnnnnnnnnnnnnnnnnnnnnnnnnnnnnnnnnnnnnnnnnnnnnnnnnnnnnnnnnnnnnnnnnnnnnnnnnnnnnnnnnnnnnnnnnnnnnnnnnnnnnnnnnnnnnnnnnnnnnnnnnnnnnnnnnnnnnnnnnnnnnnnnnnnnnnnnnnnnnnnnnnnnnnnnnnnnnnnnnnnnnnnnnnnnnnnnnnnnnnnnnnnnnnnnnnnnnnnnnnnnnnnnnnnnnnnnnnnnnnnnnnnnnnnnnnnnnnnnnnnnnnnnnnnnnnnnnnnnnnnnnnnnnnnnnnnnnnnnnnnnnnnnnnnnnnnnnnnnnnnnnnnnnnnnnnnnnnnnnnnnnnnnnnnnnnnnnnnnnnnnnnnnnnnnnnnnnnnnnnnnnnnnnnnnnnnnnnnnnnnnnnnnnnnnnnnnnnnnnnnnnnnnnnnnnnnnnnnnnnnnnnnnnnnnnnnnnnnnnnnnnnnnnnnnnnnnnnnnnnnnnnnnnnnnnnnnnnnnnnnnnnnnnnnnnnnnnnnnnnnnnnnnnnnnnnnnnnnnnnnnnnnnnnnnnnnnnnnnnnnnnnnnnnnnnnnnnnnnnnnnnnnnnnnnnnnnnnnnnnnnnnnnnnnnnnnnnnnnnnnnnnnnnnnnnnnnnnnnnnnnnnnnnnnnnnnnnnnnnnnnnnnnnnnnnnnnnnnnnnnnnnnnnnnnnnnnnnnnnnnnnnnnnnnnnnnnnnnnnnnnnnnnnnnnnnnnnnnnnnnnnnnnnnnnnnnnnnnnnnnnnnnnnnnnnnnnnnnnnnnnnnnnnnnnnnnnnnnnnnnnnnnnnnnnnnnnnnnnnnnnnnnnnnnnnnnnnnnnnnnnnnnnnnnnnnnnnnnnnnnnnnnnnnnnnnnnnnnnnnnnnnnnnnnnnnnnnnnnnnnnnnnnnnnnnnnnnnnnnnnnnnnnnnnnnnnnnnnnnnnnnnnnnnnnnnnnnnnnnnnnnnnnnnnnnnnnnnnnnnnnnnnnnnnnnnnnnnnnnnnnnnnnnnnnnnnnnnnnnnnnnnnnnnnnnnnnnnnnnnnnnnnnnnnnnnnnnnnnnnnnnnnnnnnnnnnnnnnnnnnnnnnnnnnnnnnnnnnnnnnnnnnnnnnnnnnnnnnnnnnnnnnnnnnnnnnnnnnnnnnnnnnnnnnnnnnnnnnnnnnnnnnnnnnnnnnnnnnnnnnnnnnnnnnnnnnnnnnnnnnnnnnnnnnnnnnnnnnnnnnnnnnnnnnnnnnnnnnnnnnnnnnnnnnnnnnnnnnnnnnnnnnnnnnnnnnnnnnnnnnnnnnnnnnnnnnnnnnnnnnnnnnnnnnnnnnnnnnnnnnnnnnnnnnnnnnnnnnnnnnnnnnnnnnnnnnnnnnnnnnnnnnnnnnnnnnnnnnnnnnnnnnnnnnnnnnnnnnnnnnnnnnnnnnnnnnnnnnnnnnnnnnnnnnnnnnnnnnnnnnnnnnnnnnnnnnnnnnnnnnnnnnnnnnnnnnnnnnnnnnnnnnnnnnnnnnnnnnnnnnnnnnnnnnnnnnnnnnnnnnnnnnnnnnnnnnnnnnnnnnnnnnnnnnnnnnnnnnnnnnnnnnnnnnnnnnnnnnnnnnnnnnnnnnnnnnnnnnnnnnnnnnnnnnnnnnnnnnnnnnnnnnnnnnnnnnnnnnnnnnnnnnnnnnnnnnnnnnnnnnnnnnnnnnnnnnnnnnnnnnnnnnnnnnnnnnnnnnnnnnnnnnnnnnnnnnnnnnnnnnnnnnnnnnnnnnnnnnnnnnnnnnnnnnnnnnnnnnnnnnnnnnnnnnnnnnnnnnnnnnnnnnnnnnnnnnnnnnnnnnnnnnnnnnnnnnnnnnnnnnnnnnnnnnnnnnnnnnnnnnnnnnnnnnnnnnnnnnnnnnnnnnnnnnnnnnnnnnnnnnnnnnnnnnnnnnnnnnnnnnnnnnnnnnnnnnnnnnnnnnnnnnnnnnnnnnnnnnnnnnnnnnnnnnnnnnnnnnnnnnnnnnnnnnnnnnnnnnnnnnnnnnnnnnnnnnnnnnnnnnnnnnnnnnnnnnnnnnnnnnnnnnnnnnnnnnnnnnnnnnnnnnnnnnnnnnnnnnnnnnnnnnnnnnnnnnnnnnnnnnnnnnnnnnnnnnnnnnnnnnnnnnnnnnnnnnnnnnnnnnnnnnnnnnnnnnnnnnnnnnnnnnnnnnnnnnnnnnnnnnnnnnnnnnnnnnnnnnnnnnnnnnnnnnnnnnnnnnnnnnnnnnnnnnnnnnnnnnnnnnnnnnnnnnnnnnnnnnnnnnnnnnnnnnnnnnnnnnnnnnnnnnnnnnnnnnnnnnnnnnnnnnnnnnnnnnnnnnnnnnnnnnnnnnnnnnnnnnnnnnnnnnnnnnnnnnnnnnnnnnnnnnnnnnnnnnnnnnnnnnnnnnnnnnnnnnnnnnnnnnnnnnnnnnnnnnnnnnnnnnnnnnnnnnnnnnnnnnnnnnnnnnnnnnnnnnnnnnnnnnnnnnnnnnnnnnnnnnnnnnnnnnnnnnnnnnnnnnnnnnnnnnnnnnnnnnnnnnnnnnnnnnnnnnnnnnnnnnnnnnnnnnnnnnnnnnnnnnnnnnnnnnnnnnnnnnnnnnnnnnnnnnnnnnnnnnnnnnnnnnnnnnnnnnnnnnnnnnnnnnnnnnnnnnnnnnnnnnnnnnnnnnnnnnnnnnnnnnnnnnnnnnnnnnnnnnnnnnnnnnnnnnnnnnnnnnnnnnnnnnnnnnnnnnnnnnnnnnnnnnnnnnnnnnnnnnnnnnnnnnnnnnnnnnnnnnnnnnnnnnnnnnnnnnnnnnnnnnnnnnnnnnnnnnnnnnnnnnnnnnnnnnnnnnnnnnnnnnnnnnnnnnnnnnnnnnnnnnnnnnnnnnnnnnnnnnnnnnnnnnnnnnnnnnnnnnnnnnnnnnnnnnnnnnnnnnnnnnnnnnnnnnnnnnnnnnnnnnnnnnnnnnnnnnnnnnnnnnnnnnnnnnnnnnnnnnnnnnnnnnnnnnnnnnnnnnnnnnnnnnnnnnnnnnnnnnnnnnnnnnnnnnnnnnnnnnnnnnnnnnnnnnnnnnnnnnnnnnnnnnnnnnnnnnnnnnnnnnnnnnnnnnnnnnnnnnnnnnnnnnnnnnnnnnnnnnnnnnnnnnnnnnnnnnnnnnnnnnnnnnnnnnnnnnnnnnnnnnnnnnnnnnnnnnnnnnnnnnnnnnnnnnnnnnnnnnnnnnnnnnnnnnnnnnnnnnnnnnnnnnnnnnnnnnnnnnnnnnnnnnnnnnnnnnnnnnnnnnnnnnnnnnnnnnnnnnnnnnnnnnnnnnnnnnnnnnnnnnnnnnnnnnnnnnnnnnnnnnnnnnnnnnnnnnnnnnnnnnnnnnnnnnnnnnnnnnnnnnnnnnnnnnnnnnnnnnnnnnnnnnnnnnnnnnnnnnnnnnnnnnnnnnnnnnnnnnnnnnnnnnnnnnnnnnnnnnnnnnnnnnnnnnnnnnnnnnnnnnnnnnnnnnnnnnnnnnnnnnnnnnnnnnnnnnnnnnnnnnnnnnnnnnnnnnnnnnnnnnnnnnnnnnnnnnnnnnnnnnnnnnnnnnnnnnnnnnnnnnnnnnnnnnnnnnnnnnnnnnnnnnnnnnnnnnnnnnnnnnnnnnnnnnnnnnnnnnnnnnnnnnnnnnnnnnnnnnnnnnnnnnnnnnnnnnnnnnnnnnnnnnnnnnnnnnnnnnnnnnnnnnnnnnnnnnnnnnnnnnnnnnnnnnnnnnnnnnnnnnnnnnnnnnnnnnnnnnnnnnnnnnnnnnnnnnnnnnnnnnnnnnnnnnnnnnnnnnnnnnnnnnnnnnnnnnnnnnnnnnnnnnnnnnnnnnnnnnnnnnnnnnnnnnnnnnnnnnnnnnnnnnnnnnnnnnnnnnnnnnnnnnnnnnnnnnnnnnnnnnnnnnnnnnnnnnnnnnnnnnnnnnnnnnnnnnnnnnnnnnnnnnnnnnnnnnnnnnnnnnnnnnnnnnnnnnnnnnnnnnnnnnnnnnnnnnnnnnnnnnnnnnnnnnnnnnnnnnnnnnnnnnnnnnnnnnnnnnnnnnnnnnnnnnnnnnnnnnnnnnnnnnnnnnnnnnnnnnnnnnnnnnnnnnnnnnnnnnnnnnnnnnnnnnnnnnnnnnnnnnnnnnnnnnnnnnnnnnnnnnnnnnnnnnnnnnnnnnnnnnnnnnnnnnnnnnnnnnnnnnnnnnnnnnnnnnnnnnnnnnnnnnnnnnnnnnnnnnnnnnnnnnnnnnnnnnnnnnnnnnnnnnnnnnnnnnnnnnnnnnnnnnnnnnnnnnnnnnnnnnnnnnnnnnnnnnnnnnnnnnnnnnnnnnnnnnnnnnnnnnnnnnnnnnnnnnnnnnnnnnnnnnnnnnnnnnnnnnnnnnnnnnnnnnnnnnnnnnnnnnnnnnnnnnnnnnnnnnnnnnnnnnnnnnnnnnnnnnnnnnnnnnnnnnnnnnnnnnnnnnnnnnnnnnnnnnnnnnnnnnnnnnnnnnnnnnnnnnnnnnnnnnnnnnnnnnnnnnnnnnnnnnnnnnnnnnnnnnnnnnnnnnnnnnnnnnnnnnnnnnnnnnnnnnnnnnnnnnnnnnnnnnnnnnnnnnnnnnnnnnnnnnnnnnnnnnnnnnnnnnnnnnnnnnnnnnnnnnnnnnnnnnnnnnnnnnnnnnnnnnnnnnnnnnnnnnnnnnnnnnnnnnnnnnnnnnnnnnnnnnnnnnnnnnnnnnnnnnnnnnnnnnnnnnnnnnnnnnnnnnnnnnnnnnnnnnnnnnnnnnnnnnnnnnnnnnnnnnnnnnnnnnnnnnnnnnnnnnnnnnnnnnnnnnnnnnnnnnnnnnnnnnnnnnnnnnnnnnnnnnnnnnnnnnnnnnnnnnnnnnnnnnnnnnnnnnnnnnnnnnnnnnnnnnnnnnnnnnnnnnnnnnnnnnnnnnnnnnnnnnnnnnnnnnnnnnnnnnnnnnnnnnnnnnnnnnnnnnnnnnnnnnnnnnnnnnnnnnnnnnnnnnnnnnnnnnnnnnnnnnnnnnnnnnnnnnnnnnnnnnnnnnnnnnnnnnnnnnnnnnnnnnnnnnnnnnnnnnnnnnnnnnnnnnnnnnnnnnnnnnnnnnnnnnnnnnnnnnnnnnnnnnnnnnnnnnnnnnnnnnnnnnnnnnnnnnnnnnnnnnnnnnnnnnnnnnnnnnnnnnnnnnnnnnnnnnnnnnnnnnnnnnnnnnnnnnnnnnnnnnnnnnnnnnnnnnnnnnnnnnnnnnnnnnnnnnnnnnnnnnnnnnnnnnnnnnnnnnnnnnnnnnnnnnnnnnnnnnnnnnnnnnnnnnnnnnnnnnnnnnnnnnnnnnnnnnnnnnnnnnnnnnnnnnnnnnnnnnnnnnnnnnnnnnnnnnnnnnnnnnnnnnnnnnnnnnnnnnnnnnnnnnnnnnnnnnnnnnnnnnnnnnnnnnnnnnnnnnnnnnnnnnnnnnnnnnnnnnnnnnnnnnnnnnnnnnnnnnnnnnnnnnnnnnnnnnnnnnnnnnnnnnnnnnnnnnnnnnnnnnnnnnnnnnnnnnnnnnnnnnnnnnnnnnnnnnnnnnnnnnnnnnnnnnnnnnnnnnnnnnnnnnnnnnnnnnnnnnnnnnnnnnnnnnnnnnnnnnnnnnnnnnnnnnnnnnnnnnnnnnnnnnnnnnnnnnnnnnnnnnnnnnnnnnnnnnnnnnnnnnnnnnnnnnnnnnnnnnnnnnnnnnnnnnnnnnnnnnnnnnnnnnnnnnnnnnnnnnnnnnnnnnnnnnnnnnnnnnnnnnnnnnnnnnnnnnnnnnnnnnnnnnnnnnnnnnnnnnnnnnnnnnnnnnnnnnnnnnnnnnnnnnnnnnnnnnnnnnnnnnnnnnnnnnnnnnnnnnnnnnnnnnnnnnnnnnnnnnnnnnnnnnnnnnnnnnnnnnnnnnnnnnnnnnnnnnnnnnnnnnnnnnnnnnnnnnnnnnnnnnnnnnnnnnnnnnnnnnnnnnnnnnnnnnnnnnnnnnnnnnnnnnnnnnnnnnnnnnnnnnnnnnnnnnnnnnnnnnnnnnnnnnnnnnnnnnnnnnnnnnnnnnnnnnnnnnnnnnnnnnnnnnnnnnnnnnnnnnnnnnnnnnnnnnnnnnnnnnnnnnnnnnnnnnnnnnnnnnnnnnnnnnnnnnnnnnnnnnnnnnnnnnnnnnnnnnnnnnnnnnnnnnnnnnnnnnnnnnnnnnnnnnnnnnnnnnnnnnnnnnnnnnnnnnnnnnnnnnnnnnnnnnnnnnnnnnnnnnnnnnnnnnnnnnnnnnnnnnnnnnnnnnnnnnnnnnnnnnnnnnnnnnnnnnnnnnnnnnnnnnnnnnnnnnnnnnnnnnnnnnnnnnnnnnnnnnnnnnnnnnnnnnnnnnnnnnnnnnnnnnnnnnnnnnnnnnnnnnnnnnnnnnnnnnnnnnnnnnnnnnnnnnnnnnnnnnnnnnnnnnnnnnnnnnnnnnnnnnnnnnnnnnnnnnnnnnnnnnnnnnnnnnnnnnnnnnnnnnnnnnnnnnnnnnnnnnnnnnnnnnnnnnnnnnnnnnnnnnnnnnnnnnnnnnnnnnnnnnnnnnnnnnnnnnnnnnnnnnnnnnnnnnnnnnnnnnnnnnnnnnnnnnnnnnnnnnnnnnnnnnnnnnnnnnnnnnnnnnnnnnnnnnnnnnnnnnnnnnnnnnnnnnnnnnnnnnnnnnnnnnnnnnnnnnnnnnnnnnnnnnnnnnnnnnnnnnnnnnnnnnnnnnnnnnnnnnnnnnnnnnnnnnnnnnnnnnnnnnnnnnnnnnnnnnnnnnnnnnnnnnnnnnnnnnnnnnnnnnnnnnnnnnnnnnnnnnnnnnnnnnnnnnnnnnnnnnnnnnnnnnnnnnnnnnnnnnnnnnnnnnnnnnnnnnnnnnnnnnnnnnnnnnnnnnnnnnnnnnnnnnnnnnnnnnnnnnnnnnnnnnnnnnnnnnnnnnnnnnnnnnnnnnnnnnnnnnnnnnnnnnnnnnnnnnnnnnnnnnnnnnnnnnnnnnnnnnnnnnnnnnnnnnnnnnnnnnnnnnnnnnnnnnnnnnnnnnnnnnnnnnnnnnnnnnnnnnnnnnnnnnnnnnnnnnnnnnnnnnnnnnnnnnnnnnnnnnnnnnnnnnnnnnnnnnnnnnnnnnnnnnnnnnnnnnnnnnnnnnnnnnnnnnnnnnnnnnnnnnnnnnnnnnnnnnnnnnnnnnnnnnnnnnnnnnnnnnnnnnnnnnnnnnnnnnnnnnnnnnnnnnnnnnnnnnnnnnnnnnnnnnnnnnnnnnnnnnnnnnnnnnnnnnnnnnnnnnnnnnnnnnnnnnnnnnnnnnnnnnnnnnnnnnnnnnnnnnnnnnnnnnnnnnnnnnnnnnnnnnnnnnnnnnnnnnnnnnnnnnnnnnnnnnnnnnnnnnnnnnnnnnnnnnnnnnnnnnnnnnnnnnnnnnnnnnnnnnnnnnnnnnnnnnnnnnnnnnnnnnnnnnnnnnnnnnnnnnnnnnnnnnnnnnnnnnnnnnnnnnnnnnnnnnnnnnnnnnnnnnnnnnnnnnnnnnnnnnnnnnnnnnnnnnnnnnnnnnnnnnnnnnnnnnnnnnnnnnnnnnnnnnnnnnnnnnnnnnnnnnnnnnnnnnnnnnnnnnnnnnnnnnnnnnnnnnnnnnnnnnnnnnnnnnnnnnnnnnnnnnnnnnnnnnnnnnnnnnnnnnnnnnnnnnnnnnnnnnnnnnnnnnnnnnnnnnnnnnnnnnnnnnnnnnnnnnnnnnnnnnnnnnnnnnnnnnnnnnnnnnnnnnnnnnnnnnnnnnnnnnnnnnnnnnnnnnnnnnnnnnnnnnnnnnnnnnnnnnnnnnnnnnnnnnnnnnnnnnnnnnnnnnnnnnnnnnnnnnnnnnnnnnnnnnnnnnnnnnnnnnnnnnnnnnnnnnnnnnnnnnnnnnnnnnnnnnnnnnnnnnnnnnnnnnnnnnnnnnnnnnnnnnnnnnnnnnnnnnnnnnnnnnnnnnnnnnnnnnnnnnnnnnnnnnnnnnnnnnnnnnnnnnnnnnnnnnnnnnnnnnnnnnnnnnnnnnnnnnnnnnnnnnnnnnnnnnnnnnnnnnnnnnnnnnnnnnnnnnnnnnnnnnnnnnnnnnnnnnnnnnnnnnnnnnnnnnnnnnnnnnnnnnnnnnnnnnnnnnnnnnnnnnnnnnnnnnnnnnnnnnnnnnnnnnnnnnnnnnnnnnnnnnnnnnnnnnnnnnnnnnnnnnnnnnnnnnnnnnnnnnnnnnnnnnnnnnnnnnnnnnnnnnnnnnnnnnnnnnnnnnnnnnnnnnnnnnnnnnnnnnnnnnnnnnnnnnnnnnnnnnnnnnnnnnnnnnnnnnnnnnnnnnnnnnnnnnnnnnnnnnnnnnnnnnnnnnnnnnnnnnnnnnnnnnnnnnnnnnnnnnnnnnnnnnnnnnnnnnnnnnnnnnnnnnnnnnnnnnnnnnnnnnnnnnnnnnnnnnnnnnnnnnnnnnnnnnnnnnnnnnnnnnnnnnnnnnnnnnnnnnnnnnnnnnnnnnnnnnnnnnnnnnnnnnnnnnnnnnnnnnnnnnnnnnnnnnnnnnnnnnnnnnnnnnnnnnnnnnnnnnnnnnnnnnnnnnnnnnnnnnnnnnnnnnnnnnnnnnnnnnnnnnnnnnnnnnnnnnnnnnnnnnnnnnnnnnnnnnnnnnnnnnnnnnnnnnnnnnnnnnnnnnnnnnnnnnnnnnnnnnnnnnnnnnnnnnnnnnnnnnnnnnnnnnnnnnnnnnnnnnnnnnnnnnnnnnnnnnnnnnnnnnnnnnnnnnnnnnnnnnnnnnnnnnnnnnnnnnnnnnnnnnnnnnnnnnnnnnnnnnnnnnnnnnnnnnnnnnnnnnnnnnnnnnnnnnnnnnnnnnnnnnnnnnnnnnnnnnnnnnnnnnnnnnnnnnnnnnnnnnnnnnnnnnnnnnnnnnnnnnnnnnnnnnnnnnnnnnnnnnnnnnnnnnnnnnnnnnnnnnnnnnnnnnnnnnnnnnnnnnnnnnnnnnnnnnnnnnnnnnnnnnnnnnnnnnnnnnnnnnnnnnnnnnnnnnnnnnnnnnnnnnnnnnnnnnnnnnnnnnnnnnnnnnnnnnnnnnnnnnnnnnnnnnnnnnnnnnnnnnnnnnnnnnnnnnnnnnnnnnnnnnnnnnnnnnnnnnnnnnnnnnnnnnnnnnnnnnnnnnnnnnnnnnnnnnnnnnnnnnnnnnnnnnnnnnnnnnnnnnnnnnnnnnnnnnnnnnnnnnnnnnnnnnnnnnnnnnnnnnnnnnnnnnnnnnnnnnnnnnnnnnnnnnnnnnnnnnnnnnnnnnnnnnnnnnnnnnnnnnnnnnnnnnnnnnnnnnnnnnnnnnnnnnnnnnnnnnnnnnnnnnnnnnnnnnnnnnnnnnnnnnnnnnnnnnnnnnnnnnnnnnnnnnnnnnnnnnnnnnnnnnnnnnnnnnnnnnnnnnnnnnnnnnnnnnnnnnnnnnnnnnnnnnnnnnnnnnnnnnnnnnnnnnnnnnnnnnnnnnnnnnnnnnnnnnnnnnnnnnnnnnnnnnnnnnnnnnnnnnnnnnnnnnnnnnnnnnnnnnnnnnnnnnnnnnnnnnnnnnnnnnnnnnnnnnnnnnnnnnnnnnnnnnnnnnnnnnnnnnnnnnnnnnnnnnnnnnnnnnnnnnnnnnnnnnnnnnnnnnnnnnnnnnnnnnnnnnnnnnnnnnnnnnnnnnnnnnnnnnnnnnnnnnnnnnnnnnnnnnnnnnnnnnnnnnnnnnnnnnnnnnnnnnnnnnnnnnnnnnnnnnnnnnnnnnnnnnnnnnnnnnnnnnnnnnnnnnnnnnnnnnnnnnnnnnnnnnnnnnnnnnnnnnnnnnnnnnnnnnnnnnnnnnnnnnnnnnnnnnnnnnnnnnnnnnnnnnnnnnnnnnnnnnnnnnnnnnnnnnnnnnnnnnnnnnnnnnnnnnnnnnnnnnnnnnnnnnnnnnnnnnnnnnnnnnnnnnnnnnnnnnnnnnnnnnnnnnnnnnnnnnnnnnnnnnnnnnnnnnnnnnnnnnnnnnnnnnnnnnnnnnnnnnnnnnnnnnnnnnnnnnnnnnnnnnnnnnnnnnnnnnnnnnnnnnnnnnnnnnnnnnnnnnnnnnnnnnnnnnnnnnnnnnnnnnnnnnnnnnnnnnnnnnnnnnnnnnnnnnnnnnnnnnnnnnnnnnnnnnnnnnnnnnnnnnnnnnnnnnnnnnnnnnnnnnnnnnnnnnnnnnnnnnnnnnnnnnnnnnnnnnnnnnnnnnnnnnnnnnnnnnnnnnnnnnnnnnnnnnnnnnnnnnnnnnnnnnnnnnnnnnnnnnnnnnnnnnnnnnnnnnnnnnnnnnnnnnnnnnnnnnnnnnnnnnnnnnnnnnnnnnnnnnnnnnnnnnnnnnnnnnnnnnnnnnnnnnnnnnnnnnnnnnnnnnnnnnnnnnnnnnnnnnnnnnnnnnnnnnnnnnnnnnnnnnnnnnnnnnnnnnnnnnnnnnnnnnnnnnnnnnnnnnnnnnnnnnnnnnnnnnnnnnnnnnnnnnnnnnnnnnnnnnnnnnnnnnnnnnnnnnnnnnnnnnnnnnnnnnnnnnnnnnnnnnnnnnnnnnnnnnnnnnnnnnnnnnnnnnnnnnnnnnnnnnnnnnnnnnnnnnnnnnnnnnnnnnnnnnnnnnnnnnnnnnnnnnnnnnnnnnnnnnnnnnnnnnnnnnnnnnnnnnnnnnnnnnnnnnnnnnnnnnnnnnnnnnnnnnnnnnnnnnnnnnnnnnnnnnnnnnnnnnnnnnnnnnnnnnnnnnnnnnnnnnnnnnnnnnnnnnnnnnnnnnnnnnnnnnnnnnnnnnnnnnnnnnnnnnnnnnnnnnnnnnnnnnnnnnnnnnnnnnnnnnnnnnnnnnnnnnnnnnnnnnnnnnnnnnnnnnnnnnnnnnnnnnnnnnnnnnnnnnnnnnnnnnnnnnnnnnnnnnnnnnnnnnnnnnnnnnnnnnnnnnnnnnnnnnnnnnnnnnnnnnnnnnnnnnnnnnnnnnnnnnnnnnnnnnnnnnnnnnnnnnnnnnnnnnnnnnnnnnnnnnnnnnnnnnnnnnnnnnnnnnnnnnnnnnnnnnnnnnnnnnnnnnnnnnnnnnnnnnnnnnnnnnnnnnnnnnnnnnnnnnnnnnnnnnnnnnnnnnnnnnnnnnnnnnnnnnnnnnnnnnnnnnnnnnnnnnnnnnnnnnnnnnnnnnnnnnnnnnnnnnnnnnnnnnnnnnnnnnnnnnnnnnnnnnnnnnnnnnnnnnnnnnnnnnnnnnnnnnnnnnnnnnnnnnnnnnnnnnnnnnnnnnnnnnnnnnnnnnnnnnnnnnnnnnnnnnnnnnnnnnnnnnnnnnnnnnnnnnnnnnnnnnnnnnnnnnnnnnnnnnnnnnnnnnnnnnnnnnnnnnnnnnnnnnnnnnnnnnnnnnnnnnnnnnnnnnnnnnnnnnnnacgaaaatgaaacgatgaaacgattgaaacgaagtcaaaaacagcgtttttgacctgataatgaggataaaaagaaaaataatttttttgagtgaaacgattgtgaaacgatgaaacgactggtttcatcttctttcgattggccgtatcgacctaacctcttggcgattggaaagttatcaaacagaccgcaaaatttgataaaacaggctccaaaaatctcttgcccaaatcgcggcggctcctacaatatccttccgtggcccatcgcgacacaaacgaaggggtgtccggaaaccgcggcgggcgatccagcaaaagaggggattcggtcaaagaaattcaataaccaatcaaggcccagccggacagggattcttcaggcttgggattcgataagcagggcttgttaaggaccggaaaactccgagacagtatttccccggaggacggtgcgcccgcaggacaaccttgggttgagatcgcagcccatcgataggagaaaccaatgacagacacaacaggcgatgcagtttccacacaagtgttagaatgggttcaaacaaacgattggtatcagatcaacacggatacaaatcaactccgcttggagcggcgttttggccgggcgatagaaacgatggcccgccatctggaatcggaggataagccaaagctgcgcaggcagatgctgcattgctgggactccctgaccgccaagtgcaggaccatcgatctgctctgtcgggcgggctgctttagcctgaaggatcgcatggaactggattttctgcgatgcaaggcggtaggcgcagggtgtgaattggccgaactgctgaatctgattcacagatctttggcctgcgaaagagaggaaccggatctgtctatgcggaaatgtcgcgctgtcaactctgataacacggcggaatggctcacttaccgccaggcggccgacattctggtggtcagtaaggccaccatctgccggtgggtaaaggagaggaaattggttggcaatggcaagcgtggacgccagatccggctcagcaagaccagcgtcctattggctaaacaggatatggaagatcagcaattaagacaggatgtccaggatctgagaaaggatgctcgaaagacaggtttttagacggtaaacggctggttgcaggcagtggaggtcattggccttttttcaaagagaattgaaaggggttgcatcttttatctctgcagtcagaccaggtttgtttggcggaaaataagagaaattgattgttgccaagtctacactatttcggtattatttccttattcagaaaagaaaacaatcaagcacacagaggtatcctgcttttcgatttatagggatagagacataaggagaaatctgtgaattataatctgctcgatgaaaagtggattccggttctttattccagcggaaaattcgaccacgtaggcatcaaggaagcacttgcgcaagcaaataagattcgctgtatcgccgccagcaatccgatggatcgtgttgcaatcattcgatttctattggcaatcttatattggtgtaagggaaacccaccggaaggaaacagtatgcaaccagtcgattcgcttcccgccgactggttcttgaaactcgaaaaaaacagaaattgctttaatctgctgggggaaaccgcaagattctatcaagatccaaatgcaaagcgttcgcgtacaattacagatttgttacaggaaattccaaccggtaataacttttggcactttagacattctacggatgaaaaggatggactttgcttaccttgttgtgtcttgggcttgctacgcttgcctctgttttcagttagcgggttgcccgacctcaagtcgggaataaatggtgttccgcctatatatgttgttcctgtcggcttgacactaacagaaactcttgctgcaaactggatacgcgttgcatcagttggcgtaccatcgtggactcagcctactcttcgtccttccgaagacagtgatgttccattactgacggggttaactgtattatcacgacgggtgtggctccatgaaatagatggacctattgacacctgtattggatgcggtttaaaaacacaattagttcgaacatgtgaatttcaaacggcaggacgactggaaaacgcacgatggaatgatccccatgtgctttatttttctacgccgactcgtaagtcctacaaagcagccgatttgaccgaagccggcaaatttcgtatggatcgtccatggcctgacttattagcacgtattgccaggcagaatgggaaaaaaattgcatcatttctaattgtcgggttcgctactgataatgcaaagaatgtcgatgtgtgggagcgtgttgtaaccatgcctttgggtgaggacagaacgccgttcgtagaacagtggcggaaagagaataagcggctcgaatctcgtgtgagcagatcgaagtcgctttctactgctatgattgtttccgttcggccgcatgtcgagtatgcggtatccacgcgggcagcagaattatttactgcggatgatgcagcatggcagaagatagcgaaagagtataacccaatgatgactgttattgctaagtcgctttcgccgggctttatgactgatgctgtccaacgacggagacatatcgccagtttaataccggatttgcaaaccaagaaaggagaagaagcatgagctcgacagaagcatacataaaggcgctcggctcgctcaaaaacggtgatttaggattgttgcggactcatgctggtcagggacttgacgaatcagtcaatggcttcgatctgtttgcaggcctctggtggccattgaggcagaagaatcaatgggcgccaagacgagaagtagcatggcttatcgcgaaactctatgcattctgtccggtggagcattcacccggacagacatttgcccgtcagttagggttttgtctgccggacaaacccgaatgccagaaaagctatggagagcggtttgacaaggtactatcattgccgctcgataaaattgagcctgccctgcaatgggccttgcgagaacttgcttcgaataataaaaaagtggactgggtaaagctgacagacgatttgtcgcgatgggaaaatgaaacgatccgccttcggtgggcggaggaatttttagggagcgaaaggaaactactatgttaatagagattcatgcaattcaaaatcatagtccatcaaatctgaaccgtgatgacctcggagcgccgaagacctgttatttcggaggagtactgcgatctcgcatctcaagtcagtgcatcaagcggagcattcgcatgagcaaggaatttgagaaattgcttggcggtattcgtacgagacagcttgcgacgctgatagccgataaggtcactgggaaaacagatgttagaaagcgggctgaaaaaattatgacgctctgtggcctcaagcccaagaagacaaacaagaaaagcgatgaagaaagtgagcctaataacccgtataaaagcaagatgctcatctataccacgaaagacgctgttgaagagatggccaggcttttgcagagtggtgacaagaaaactgatgaacaattagcgcaggaattcggcacacttatctctgagcggacaactgtgccggatatggctctaagcggtaggatgctggaaaccggcgttctgaaagacactaccgttgaggcggctttgcaagttgctcatgcaatctcaacacacgaggcgcgcccggaggtcgattattatatcgctgctgatgatgtaaaaggtcaagacgctggagcaggctttgtggatgaagcgatgttcgcgtcagcgtgcttttataagtacttctctatcgattgggaacagttggtcaaaaacctcaatgggaataagaatttggcggcgcacacagtcggggcattcattcgagctgcagcgatggccaatccctccggcaagcagaacgcttttgctgctcacaatttgccggatggaatactggtggaaataaagggctcccccataagctatgccaatgcattcgccagtccggtgccaagcaagggatcacgtgacatggtttcgcagagcatcgcccaattagcgcaatatattcacgatatcgacacaggatacggaaaaccgaaagagcggttctggttttcgccgaatttacggcatcctataatcatagcagaaatcaagaaagaaagcggtattgctgacaaaaatttcaaatcgctggacgaattggttccggctgttatcaacgctcttggatacgactggaacgaagttaaaaaggtggttataaatcagggggtcgcgtaatggatggcaatactttgttcctgcgacttgaagggccgatgcagtcatggggggttcaggaatcgaagttcgtggtgaggcggacggcggaagccccgacaaaatcaggtgttatcggcatgctcagtgcggcaatgggtatttcccgtttcgatgtcaaacaatggcttccgttcactaagcttaaaatgggcgttcgtattgaccgccctggaattcgttggtgggactatcacactgtcggggcgaaaatgaaaatgcgcaccgctgagggcaaatctaaggaaggcgcgatgctcacacgccgcgaatatctctgtgatgcgtccttcctcgttgcattacagggagacgcgggtttgataggagagctggagtgtgcggtacggaatcctaaatgggttttgtaccttggccgtaaatgttgtccgccatcgcgacctatagcagaattggggcacacaattggatatttcgacaatctggataccgctctgcgatctatcgcttggcagccgcggttggatatggccgaatgtcaagattccatagattgcttactggattggcagccttcggctgatcagcccgaagcccctcctgatgcgttaatatggtacgatgtgccggattccttcgagccgccgtcacaccatccgaggttcgtcatacgtaagtcattgtctgttggaaaagatggggatatatgtgttggaacccctttgcagaaaaataccccgaacccacttcgtccgagggccgattatacaaatagtcagtacagggaacggcgggaagaacggttgcagttagaccacaggctttgtgttttctgcaaatctccagcaacaacagttcagcacatcacctatcgccatgccggcggcgatgagacagtcgatgacctccgctcgttatgtcgcctgtgtcacgatgcggtgacaatgatagaatatggtcttgggatgggattagaccgtataaatccggaagaccgctattggcgcaacaggatcatccaaaagcgtaataaaataattgaattccgatcgcttgaaacgcgccgacgccggtttgcggcagaggaggtggaatgatgttcatctcgacattactcattgacacggggacaaatcctgaccggccacgaccggcacgatcctggttgcgaaatttgtatcgtgtgcatcagcgtttgtgcatggcgtttccatctaaggaacgcgaaggcaaagatgaagactttttggatccgttcaagcccgaagactttggcggcggacaggtacatattgaccgacggacggggaatggtttcctttttcgtatagatgctcaactgggtggtactgtggtaatccttgtttcgtcgtctataaggcccaactgggactatgcttttcataacgccggtcatttccttgctgcgcctccgcaaatcaaagagtacaatccttctttcaaaaagggacaattctttaaattccgacttacagcaaatccaacaagaaggtgcacaaagaattccaaagatagcaacggaaatcctgttaaccctcaatatatagggaagcgtattcctgttccttttgatatgcttaaagaatggcttatcgttcgtggtaaaaagggtggatttgctattcatgatacagtggttcaatccggctatatctacatttataagcaggacgataaacctgaaagcaaacgtctgctttctgtccgattcgatgggatgctgacagttacagaccccgaccaattccgcaaaactattgtagccggcataggctcgggcaaggcgttcggcttcggattattgtctattgcgccggttaagtaaaaccggaaggaggttctttgacaagtgaataggagaataaatcttcaggagttgccgaggttctcggataagctctcatatctctatgtagataaagcagtcatcgagcaggaagctaaatccattgcactctggcagcaagacggtgtaacgagtgtccccgcggccagtttagccgtccttctgctcggccctggtacaaaaatcacacacgaggccgtcaagacattggcggacaacaattgtctgatagcatggtgcggagaagatgccgttcgcttttatgctgccggttgcggcggaacgcgctctgcgagaaatctcttaatgcaggcgcgtctggtgaccaatgagataacacggctccaggtggtcgttcggatgtactgcatccgttttcccaacgtcccggactccggcctgacgcttcaacagcttcgtggaatggaagggattcgtgtacgacaggcgtatgccgaagcagccaaggccgcgggcatcaagtggcaaggtcgctcatataataggcaggaatggaatgcggcggaccccgttaatcgtgctctttcggcagcaaatgcctgcctgtatggacttgtacacgcggctgtcatttctggaggatactcgccggcgcttggatttgtacacacaggcaaacatctgtcgttcgtctatgacatcgccgacctgtataaagttgagcatattattccattggcattcaacttggcaaaggcaaatccgccgcagcttgagcgtgaggtgcggatggagtgtcggcgatgtttcaacgcgacaagactgatggaaaaaattctgcccgatattgcaaaggtcttgtctgtccccgtggcccaggaagaacagttgatagaggaatttgccggagatgaaagcaggccagtagactggtggcagccggtaacgcttaaagccgatatgccgatagggcagatattaaaattgcagactgtactgggcgacttacaggaagagaacaaaaatggtagtgatgattttggagcgggtaagtccgtcactgcggggtgagctaactaggtggctgattcagcctaaaaccggagtgtttgtcgggcatacttctgcacgggttcgcgaattgctttggcagcgcgttgaccgtagtgttaaaggcggcgcggctatactgatttacgacagtaacaacgagcagggattttctattcgtactactggtgacactcgccgtttgattgttgacttcgagggacttttgcttccaaaatccccacttacaagataattttcagtattttccccacgcatgtgggggtgaaccgtttcccggctgggcttggccgatcaagggcgtattttccccacgcatgtgggggtgaaccgatatccatcgcgataaatcaataacgggatttattttccccacgcatgtgggggtgaaccgtctttgttttcatcctggatcaatcctccccaattttccccacgcatgtgggggtgaaccgacatattcagacggcattttgtcgttgagaaattttccccacgcatgtgggggtgaaccgactctataaaaacatgtattggcattacccccattttccccacgcatgtgggggtgaaccggtatattcatccagcacagtggtctccttccgattttccccacgcatgtgggggtgaaccgagacgtgctttgtcgattgtacgatgttcggcattttccccacgcatgtgggggtgaaccgatgaaacgtatcgttaaaagcagattgattgattttccccacgcatgtgggggtgaaccgatttcgagaaagtctggaaggcgcaaaccaagattttccccacgcatgtgggggtgaaccgacgcggcgaaactatatgctgcgtctgatcgattttccccacgcatgtgggggtgaaccgccagcagtcgccgaccgtgctgcatacgttgtattttccccacgcatgtgggggtgaaccggcaaacggcgcgtagcggccgaagctgccctcattttccccacgcatgtgggggtgaaccggcgccggctttcgcgtcaaccttcgagccgtcattttccccacgcatgtgggggtgaaccgacccgcttcccgatacaaagccgcgcgaggccattttccccacgcatgtgggggtgaaccggtcaatactacgttttccgacaatcaggttgaattttccccacgcatgtgggggtgaaccggtattccacggcgttttcggatcgacaaatgaattttccccacgcatgtgggggtgaaccgcatagtttccgagtcctttagggcgtgccatgattttccccacgcatgtgggggtgaaccgtcaaatccgagacccttaatggcttccataaaattttccccacgcatgtgggggtgaaccgaatcagcccattccgacggacgattccatcgcattttccccacgcatgtgggggtgaaccgtgattgaagccggggatatagactctctcgccattttccccacgcatgtggggggtgaaccgaattcgccgaagtcatggtacgccatttcttatccccaaaatataaaaataacgactggttagtaatggatagccaattcagtcctgaggattgtccgggtcatcttgttctgattcatcaccccgatattgaagacggctattctcaaaacctgaccatccagaaaatggaaatattttcaaatcgccgcaaagacggctttttgaaaaaatagtaaacaccctgtttttgagtgccttaagtggcgatgatacaatcgtcatagagagcgttgaatctgaggatatcaatattgttgggattaagaaagattagaaagagtgatgtcgtatggagcgtcttgagtcattaataaaagacaggcaggaatggattaccatatcagagaaaaacaactttgactttgatatgattctatcgggcctttacaatgatccttcccattatatcaagagaattttacgcttattcttgacaatacttctctaaagcttacaatccccgttatggacaatctgagggtaatatccgggcttatttatctacttggcatttcagcaattggttatgctcaggaggacactatcccccagtggaccgtcagagacttctgagttcaattacaggtacgaatgaccgattctcaggtccttgatcttttaggtcagcccctggagagcaaaagcgccgattcggcctgtgtatggtgctatcaggaggctcctgtccgggaaggagatcggattatcaggcggccgcgcagcggcctcttgagattcagaaagggtattgccgaggacagagaggcccttcttcttatctcatggattgagccgaactgggagaatttccaatctcatactcttgtgcaatggcacgcccagcaaagacggctggaagcggcggaacgccaaaagcagattgctgaacagcagcaaaaatggttggaccagagagcggagcaaactaaactgaacgtcagaccagcggtaaatccgcgggaacccgtaaatcaaacgaccagccaatctccgataactcccattgccccaacgggcaagataccttcatcaaagaaagatccttcgatttataatcttggcaatgtaggttttataatcataggcggcatcatcatcggcttaggaatagcggttgcgattttcaagggagtaaacggctgattaattggataggaataaggaacgatagaggataacttttaagggagtcatttatgtataaatatcttcttatgctttgtctttctttgccttgttttttactgttaaggagcaggcccgaccagccctttgaaagtttaaaaggcattgactcggttgggattattatagtcggtctggaccggacctccgctcaatatggccttcttgaaacggagattgctgacgaaaccgccgctttcttgaagaagtatggaatcaccccgtaattatattttttcctctctgcctgccaaagaaaatttctgtttaaacattcctcagatatttgcttttcactatagatttgatattctaaggaaaataaagatccgcagtgtatctgagcgaaaatacgcgatatggggactgccaggtccatcctgcacattgatatggatgcgttctatgcctctgtagaggtccgggacaatcccaccctccagggcaaaccgatactggtaggggcttctcctgaggaaagaggcgtggttgccgcctgctcctatgaggctcgaaaatttggcatccattccgccatgccgatgaatcaggcgattcggctttgcccccaagcgattgtcctgccagttcgaatgagtcgatatgtcgaagtgtccaagcagattcaccttatctttaatgcctataccccggatgtagaaccggtctctatcgatgaggcatttctggatgtgacgggttgcattcacctattcggcaatgcagaagaaatcggaaagaagataaaaacagacataaaaaaacagactgggttaacggcttccgtaggcattgcccccaataaattcctggcaaagctggcttcggacctgagcaagcccgatgggtttgtcctcattacggaagacaataaacagcagattcttgaccctctgcctgtttctaaaatctgggggattggaagagtcaccaccaaagagcttgaaaaatggggcattaaaaccatcgaacagatcaggacagctccccgctacatactgtcaagggttttcgggaatcagatcgaggacatcctccagctggctcagggaatcgacaacaggaaggtagagacatctacagaggcaaaaagcatttctgcggaggagaccttctccgtcgatatcctcgaccggaatacgctgtttggagttttaatccatcaggtcgaggaggtcggccagcgtcttcgggcagagaaattgcagggtcgaaccataacgctcaaattacggtatggggatttcaggacaatcacacgcagctttacgatggacaaacccaccaatatcacccaaatgctcttgctggaggcagagaccgtatttgaccagtggtataagaaatccgccggcgccctgcggctcttgggatttggcgtatccgggctttcgccggaggggactgggcagaaattattattttccgatgcggaggaagaaaaacaaaagaagatcgattctgcttttgatcaaatcagggggaaatacggagtagatagtttgaaaaggggaatctgatagttggattggcagaaagaaggttcttatactttgtatacgccaaattcatgcagcaggaggttgttctgtacccagccgccttcgcttaaaatctcttttttatatttgtactgtccaatttcattaaagttatgtaagtctttattacgattaacttttcaggggatttgtcccctggaaaggaattgtcatggaacgacgctatgagactcgaaaacgtgaaatactg

SEQ ID NO: 1024 - DNA, 104832 bp, Artificial Sequence
  Synthetic Oligonucleotide
  misc_feature (1)..(93192): n is a, c, g, or t
nnnnnnnnnnnnnnnnnnnnnnnnnnnnnnnnnnnnnnnnnnnnnnnnnnnnnnnnnnnnnnnnnnnnnnnnnnnnnnnnnnnnnnnnnnnnnnnnnnnnnnnnnnnnnnnnnnnnnnnnnnnnnnnnnnnnnnnnnnnnnnnnnnnnnnnnnnnnnnnnnnnnnnnnnnnnnnnnnnnnnnnnnnnnnnnnnnnnnnnnnnnnnnnnnnnnnnnnnnnnnnnnnnnnnnnnnnnnnnnnnnnnnnnnnnnnnnnnnnnnnnnnnnnnnnnnnnnnnnnnnnnnnnnnnnnnnnnnnnnnnnnnnnnnnnnnnnnnnnnnnnnnnnnnnnnnnnnnnnnnnnnnnnnnnnnnnnnnnnnnnnnnnnnnnnnnnnnnnnnnnnnnnnnnnnnnnnnnnnnnnnnnnnnnnnnnnnnnnnnnnnnnnnnnnnnnnnnnnnnnnnnnnnnnnnnnnnnnnnnnnnnnnnnnnnnnnnnnnnnnnnnnnnnnnnnnnnnnnnnnnnnnnnnnnnnnnnnnnnnnnnnnnnnnnnnnnnnnnnnnnnnnnnnnnnnnnnnnnnnnnnnnnnnnnnnnnnnnnnnnnnnnnnnnnnnnnnnnnnnnnnnnnnnnnnnnnnnnnnnnnnnnnnnnnnnnnnnnnnnnnnnnnnnnnnnnnnnnnnnnnnnnnnnnnnnnnnnnnnnnnnnnnnnnnnnnnnnnnnnnnnnnnnnnnnnnnnnnnnnnnnnnnnnnnnnnnnnnnnnnnnnnnnnnnnnnnnnnnnnnnnnnnnnnnnnnnnnnnnnnnnnnnnnnnnnnnnnnnnnnnnnnnnnnnnnnnnnnnnnnnnnnnnnnnnnnnnnnnnnnnnnnnnnnnnnnnnnnnnnnnnnnnnnnnnnnnnnnnnnnnnnnnnnnnnnnnnnnnnnnnnnnnnnnnnnnnnnnnnnnnnnnnnnnnnnnnnnnnnnnnnnnnnnnnnnnnnnnnnnnnnnnnnnnnnnnnnnnnnnnnnnnnnnnnnnnnnnnnnnnnnnnnnnnnnnnnnnnnnnnnnnnnnnnnnnnnnnnnnnnnnnnnnnnnnnnnnnnnnnnnnnnnnnnnnnnnnnnnnnnnnnnnnnnnnnnnnnnnnnnnnnnnnnnnnnnnnnnnnnnnnnnnnnnnnnnnnnnnnnnnnnnnnnnnnnnnnnnnnnnnnnnnnnnnnnnnnnnnnnnnnnnnnnnnnnnnnnnnnnnnnnnnnnnnnnnnnnnnnnnnnnnnnnnnnnnnnnnnnnnnnnnnnnnnnnnnnnnnnnnnnnnnnnnnnnnnnnnnnnnnnnnnnnnnnnnnnnnnnnnnnnnnnnnnnnnnnnnnnnnnnnnnnnnnnnnnnnnnnnnnnnnnnnnnnnnnnnnnnnnnnnnnnnnnnnnnnnnnnnnnnnnnnnnnnnnnnnnnnnnnnnnnnnnnnnnnnnnnnnnnnnnnnnnnnnnnnnnnnnnnnnnnnnnnnnnnnnnnnnnnnnnnnnnnnnnnnnnnnnnnnnnnnnnnnnnnnnnnnnnnnnnnnnnnnnnnnnnnnnnnnnnnnnnnnnnnnnnnnnnnnnnnnnnnnnnnnnnnnnnnnnnnnnnnnnnnnnnnnnnnnnnnnnnnnnnnnnnnnnnnnnnnnnnnnnnnnnnnnnnnnnnnnnnnnnnnnnnnnnnnnnnnnnnnnnnnnnnnnnnnnnnnnnnnnnnnnnnnnnnnnnnnnnnnnnnnnnnnnnnnnnnnnnnnnnnnnnnnnnnnnnnnnnnnnnnnnnnnnnnnnnnnnnnnnnnnnnnnnnnnnnnnnnnnnnnnnnnnnnnnnnnnnnnnnnnnnnnnnnnnnnnnnnnnnnnnnnnnnnnnnnnnnnnnnnnnnnnnnnnnnnnnnnnnnnnnnnnnnnnnnnnnnnnnnnnnnnnnnnnnnnnnnnnnnnnnnnnnnnnnnnnnnnnnnnnnnnnnnnnnnnnnnnnnnnnnnnnnnnnnnnnnnnnnnnnnnnnnnnnnnnnnnnnnnnnnnnnnnnnnnnnnnnnnnnnnnnnnnnnnnnnnnnnnnnnnnnnnnnnnnnnnnnnnnnnnnnnnnnnnnnnnnnnnnnnnnnnnnnnnnnnnnnnnnnnnnnnnnnnnnnnnnnnnnnnnnnnnnnnnnnnnnnnnnnnnnnnnnnnnnnnnnnnnnnnnnnnnnnnnnnnnnnnnnnnnnnnnnnnnnnnnnnnnnnnnnnnnnnnnnnnnnnnnnnnnnnnnnnnnnnnnnnnnnnnnnnnnnnnnnnnnnnnnnnnnnnnnnnnnnnnnnnnnnnnnnnnnnnnnnnnnnnnnnnnnnnnnnnnnnnnnnnnnnnnnnnnnnnnnnnnnnnnnnnnnnnnnnnnnnnnnnnnnnnnnnnnnnnnnnnnnnnnnnnnnnnnnnnnnnnnnnnnnnnnnnnnnnnnnnnnnnnnnnnnnnnnnnnnnnnnnnnnnnnnnnnnnnnnnnnnnnnnnnnnnnnnnnnnnnnnnnnnnnnnnnnnnnnnnnnnnnnnnnnnnnnnnnnnnnnnnnnnnnnnnnnnnnnnnnnnnnnnnnnnnnnnnnnnnnnnnnnnnnnnnnnnnnnnnnnnnnnnnnnnnnnnnnnnnnnnnnnnnnnnnnnnnnnnnnnnnnnnnnnnnnnnnnnnnnnnnnnnnnnnnnnnnnnnnnnnnnnnnnnnnnnnnnnnnnnnnnnnnnnnnnnnnnnnnnnnnnnnnnnnnnnnnnnnnnnnnnnnnnnnnnnnnnnnnnnnnnnnnnnnnnnnnnnnnnnnnnnnnnnnnnnnnnnnnnnnnnnnnnnnnnnnnnnnnnnnnnnnnnnnnnnnnnnnnnnnnnnnnnnnnnnnnnnnnnnnnnnnnnnnnnnnnnnnnnnnnnnnnnnnnnnnnnnnnnnnnnnnnnnnnnnnnnnnnnnnnnnnnnnnnnnnnnnnnnnnnnnnnnnnnnnnnnnnnnnnnnnnnnnnnnnnnnnnnnnnnnnnnnnnnnnnnnnnnnnnnnnnnnnnnnnnnnnnnnnnnnnnnnnnnnnnnnnnnnnnnnnnnnnnnnnnnnnnnnnnnnnnnnnnnnnnnnnnnnnnnnnnnnnnnnnnnnnnnnnnnnnnnnnnnnnnnnnnnnnnnnnnnnnnnnnnnnnnnnnnnnnnnnnnnnnnnnnnnnnnnnnnnnnnnnnnnnnnnnnnnnnnnnnnnnnnnnnnnnnnnnnnnnnnnnnnnnnnnnnnnnnnnnnnnnnnnnnnnnnnnnnnnnnnnnnnnnnnnnnnnnnnnnnnnnnnnnnnnnnnnnnnnnnnnnnnnnnnnnnnnnnnnnnnnnnnnnnnnnnnnnnnnnnnnnnnnnnnnnnnnnnnnnnnnnnnnnnnnnnnnnnnnnnnnnnnnnnnnnnnnnnnnnnnnnnnnnnnnnnnnnnnnnnnnnnnnnnnnnnnnnnnnnnnnnnnnnnnnnnnnnnnnnnnnnnnnnnnnnnnnnnnnnnnnnnnnnnnnnnnnnnnnnnnnnnnnnnnnnnnnnnnnnnnnnnnnnnnnnnnnnnnnnnnnnnnnnnnnnnnnnnnnnnnnnnnnnnnnnnnnnnnnnnnnnnnnnnnnnnnnnnnnnnnnnnnnnnnnnnnnnnnnnnnnnnnnnnnnnnnnnnnnnnnnnnnnnnnnnnnnnnnnnnnnnnnnnnnnnnnnnnnnnnnnnnnnnnnnnnnnnnnnnnnnnnnnnnnnnnnnnnnnnnnnnnnnnnnnnnnnnnnnnnnnnnnnnnnnnnnnnnnnnnnnnnnnnnnnnnnnnnnnnnnnnnnnnnnnnnnnnnnnnnnnnnnnnnnnnnnnnnnnnnnnnnnnnnnnnnnnnnnnnnnnnnnnnnnnnnnnnnnnnnnnnnnnnnnnnnnnnnnnnnnnnnnnnnnnnnnnnnnnnnnnnnnnnnnnnnnnnnnnnnnnnnnnnnnnnnnnnnnnnnnnnnnnnnnnnnnnnnnnnnnnnnnnnnnnnnnnnnnnnnnnnnnnnnnnnnnnnnnnnnnnnnnnnnnnnnnnnnnnnnnnnnnnnnnnnnnnnnnnnnnnnnnnnnnnnnnnnnnnnnnnnnnnnnnnnnnnnnnnnnnnnnnnnnnnnnnnnnnnnnnnnnnnnnnnnnnnnnnnnnnnnnnnnnnnnnnnnnnnnnnnnnnnnnnnnnnnnnnnnnnnnnnnnnnnnnnnnnnnnnnnnnnnnnnnnnnnnnnnnnnnnnnnnnnnnnnnnnnnnnnnnnnnnnnnnnnnnnnnnnnnnnnnnnnnnnnnnnnnnnnnnnnnnnnnnnnnnnnnnnnnnnnnnnnnnnnnnnnnnnnnnnnnnnnnnnnnnnnnnnnnnnnnnnnnnnnnnnnnnnnnnnnnnnnnnnnnnnnnnnnnnnnnnnnnnnnnnnnnnnnnnnnnnnnnnnnnnnnnnnnnnnnnnnnnnnnnnnnnnnnnnnnnnnnnnnnnnnnnnnnnnnnnnnnnnnnnnnnnnnnnnnnnnnnnnnnnnnnnnnnnnnnnnnnnnnnnnnnnnnnnnnnnnnnnnnnnnnnnnnnnnnnnnnnnnnnnnnnnnnnnnnnnnnnnnnnnnnnnnnnnnnnnnnnnnnnnnnnnnnnnnnnnnnnnnnnnnnnnnnnnnnnnnnnnnnnnnnnnnnnnnnnnnnnnnnnnnnnnnnnnnnnnnnnnnnnnnnnnnnnnnnnnnnnnnnnnnnnnnnnnnnnnnnnnnnnnnnnnnnnnnnnnnnnnnnnnnnnnnnnnnnnnnnnnnnnnnnnnnnnnnnnnnnnnnnnnnnnnnnnnnnnnnnnnnnnnnnnnnnnnnnnnnnnnnnnnnnnnnnnnnnnnnnnnnnnnnnnnnnnnnnnnnnnnnnnnnnnnnnnnnnnnnnnnnnnnnnnnnnnnnnnnnnnnnnnnnnnnnnnnnnnnnnnnnnnnnnnnnnnnnnnnnnnnnnnnnnnnnnnnnnnnnnnnnnnnnnnnnnnnnnnnnnnnnnnnnnnnnnnnnnnnnnnnnnnnnnnnnnnnnnnnnnnnnnnnnnnnnnnnnnnnnnnnnnnnnnnnnnnnnnnnnnnnnnnnnnnnnnnnnnnnnnnnnnnnnnnnnnnnnnnnnnnnnnnnnnnnnnnnnnnnnnnnnnnnnnnnnnnnnnnnnnnnnnnnnnnnnnnnnnnnnnnnnnnnnnnnnnnnnnnnnnnnnnnnnnnnnnnnnnnnnnnnnnnnnnnnnnnnnnnnnnnnnnnnnnnnnnnnnnnnnnnnnnnnnnnnnnnnnnnnnnnnnnnnnnnnnnnnnnnnnnnnnnnnnnnnnnnnnnnnnnnnnnnnnnnnnnnnnnnnnnnnnnnnnnnnnnnnnnnnnnnnnnnnnnnnnnnnnnnnnnnnnnnnnnnnnnnnnnnnnnnnnnnnnnnnnnnnnnnnnnnnnnnnnnnnnnnnnnnnnnnnnnnnnnnnnnnnnnnnnnnnnnnnnnnnnnnnnnnnnnnnnnnnnnnnnnnnnnnnnnnnnnnnnnnnnnnnnnnnnnnnnnnnnnnnnnnnnnnnnnnnnnnnnnnnnnnnnnnnnnnnnnnnnnnnnnnnnnnnnnnnnnnnnnnnnnnnnnnnnnnnnnnnnnnnnnnnnnnnnnnnnnnnnnnnnnnnnnnnnnnnnnnnnnnnnnnnnnnnnnnnnnnnnnnnnnnnnnnnnnnnnnnnnnnnnnnnnnnnnnnnnnnnnnnnnnnnnnnnnnnnnnnnnnnnnnnnnnnnnnnnnnnnnnnnnnnnnnnnnnnnnnnnnnnnnnnnnnnnnnnnnnnnnnnnnnnnnnnnnnnnnnnnnnnnnnnnnnnnnnnnnnnnnnnnnnnnnnnnnnnnnnnnnnnnnnnnnnnnnnnnnnnnnnnnnnnnnnnnnnnnnnnnnnnnnnnnnnnnnnnnnnnnnnnnnnnnnnnnnnnnnnnnnnnnnnnnnnnnnnnnnnnnnnnnnnnnnnnnnnnnnnnnnnnnnnnnnnnnnnnnnnnnnnnnnnnnnnnnnnnnnnnnnnnnnnnnnnnnnnnnnnnnnnnnnnnnnnnnnnnnnnnnnnnnnnnnnnnnnnnnnnnnnnnnnnnnnnnnnnnnnnnnnnnnnnnnnnnnnnnnnnnnnnnnnnnnnnnnnnnnnnnnnnnnnnnnnnnnnnnnnnnnnnnnnnnnnnnnnnnnnnnnnnnnnnnnnnnnnnnnnnnnnnnnnnnnnnnnnnnnnnnnnnnnnnnnnnnnnnnnnnnnnnnnnnnnnnnnnnnnnnnnnnnnnnnnnnnnnnnnnnnnnnnnnnnnnnnnnnnnnnnnnnnnnnnnnnnnnnnnnnnnnnnnnnnnnnnnnnnnnnnnnnnnnnnnnnnnnnnnnnnnnnnnnnnnnnnnnnnnnnnnnnnnnnnnnnnnnnnnnnnnnnnnnnnnnnnnnnnnnnnnnnnnnnnnnnnnnnnnnnnnnnnnnnnnnnnnnnnnnnnnnnnnnnnnnnnnnnnnnnnnnnnnnnnnnnnnnnnnnnnnnnnnnnnnnnnnnnnnnnnnnnnnnnnnnnnnnnnnnnnnnnnnnnnnnnnnnnnnnnnnnnnnnnnnnnnnnnnnnnnnnnnnnnnnnnnnnnnnnnnnnnnnnnnnnnnnnnnnnnnnnnnnnnnnnnnnnnnnnnnnnnnnnnnnnnnnnnnnnnnnnnnnnnnnnnnnnnnnnnnnnnnnnnnnnnnnnnnnnnnnnnnnnnnnnnnnnnnnnnnnnnnnnnnnnnnnnnnnnnnnnnnnnnnnnnnnnnnnnnnnnnnnnnnnnnnnnnnnnnnnnnnnnnnnnnnnnnnnnnnnnnnnnnnnnnnnnnnnnnnnnnnnnnnnnnnnnnnnnnnnnnnnnnnnnnnnnnnnnnnnnnnnnnnnnnnnnnnnnnnnnnnnnnnnnnnnnnnnnnnnnnnnnnnnnnnnnnnnnnnnnnnnnnnnnnnnnnnnnnnnnnnnnnnnnnnnnnnnnnnnnnnnnnnnnnnnnnnnnnnnnnnnnnnnnnnnnnnnnnnnnnnnnnnnnnnnnnnnnnnnnnnnnnnnnnnnnnnnnnnnnnnnnnnnnnnnnnnnnnnnnnnnnnnnnnnnnnnnnnnnnnnnnnnnnnnnnnnnnnnnnnnnnnnnnnnnnnnnnnnnnnnnnnnnnnnnnnnnnnnnnnnnnnnnnnnnnnnnnnnnnnnnnnnnnnnnnnnnnnnnnnnnnnnnnnnnnnnnnnnnnnnnnnnnnnnnnnnnnnnnnnnnnnnnnnnnnnnnnnnnnnnnnnnnnnnnnnnnnnnnnnnnnnnnnnnnnnnnnnnnnnnnnnnnnnnnnnnnnnnnnnnnnnnnnnnnnnnnnnnnnnnnnnnnnnnnnnnnnnnnnnnnnnnnnnnnnnnnnnnnnnnnnnnnnnnnnnnnnnnnnnnnnnnnnnnnnnnnnnnnnnnnnnnnnnnnnnnnnnnnnnnnnnnnnnnnnnnnnnnnnnnnnnnnnnnnnnnnnnnnnnnnnnnnnnnnnnnnnnnnnnnnnnnnnnnnnnnnnnnnnnnnnnnnnnnnnnnnnnnnnnnnnnnnnnnnnnnnnnnnnnnnnnnnnnnnnnnnnnnnnnnnnnnnnnnnnnnnnnnnnnnnnnnnnnnnnnnnnnnnnnnnnnnnnnnnnnnnnnnnnnnnnnnnnnnnnnnnnnnnnnnnnnnnnnnnnnnnnnnnnnnnnnnnnnnnnnnnnnnnnnnnnnnnnnnnnnnnnnnnnnnnnnnnnnnnnnnnnnnnnnnnnnnnnnnnnnnnnnnnnnnnnnnnnnnnnnnnnnnnnnnnnnnnnnnnnnnnnnnnnnnnnnnnnnnnnnnnnnnnnnnnnnnnnnnnnnnnnnnnnnnnnnnnnnnnnnnnnnnnnnnnnnnnnnnnnnnnnnnnnnnnnnnnnnnnnnnnnnnnnnnnnnnnnnnnnnnnnnnnnnnnnnnnnnnnnnnnnnnnnnnnnnnnnnnnnnnnnnnnnnnnnnnnnnnnnnnnnnnnnnnnnnnnnnnnnnnnnnnnnnnnnnnnnnnnnnnnnnnnnnnnnnnnnnnnnnnnnnnnnnnnnnnnnnnnnnnnnnnnnnnnnnnnnnnnnnnnnnnnnnnnnnnnnnnnnnnnnnnnnnnnnnnnnnnnnnnnnnnnnnnnnnnnnnnnnnnnnnnnnnnnnnnnnnnnnnnnnnnnnnnnnnnnnnnnnnnnnnnnnnnnnnnnnnnnnnnnnnnnnnnnnnnnnnnnnnnnnnnnnnnnnnnnnnnnnnnnnnnnnnnnnnnnnnnnnnnnnnnnnnnnnnnnnnnnnnnnnnnnnnnnnnnnnnnnnnnnnnnnnnnnnnnnnnnnnnnnnnnnnnnnnnnnnnnnnnnnnnnnnnnnnnnnnnnnnnnnnnnnnnnnnnnnnnnnnnnnnnnnnnnnnnnnnnnnnnnnnnnnnnnnnnnnnnnnnnnnnnnnnnnnnnnnnnnnnnnnnnnnnnnnnnnnnnnnnnnnnnnnnnnnnnnnnnnnnnnnnnnnnnnnnnnnnnnnnnnnnnnnnnnnnnnnnnnnnnnnnnnnnnnnnnnnnnnnnnnnnnnnnnnnnnnnnnnnnnnnnnnnnnnnnnnnnnnnnnnnnnnnnnnnnnnnnnnnnnnnnnnnnnnnnnnnnnnnnnnnnnnnnnnnnnnnnnnnnnnnnnnnnnnnnnnnnnnnnnnnnnnnnnnnnnnnnnnnnnnnnnnnnnnnnnnnnnnnnnnnnnnnnnnnnnnnnnnnnnnnnnnnnnnnnnnnnnnnnnnnnnnnnnnnnnnnnnnnnnnnnnnnnnnnnnnnnnnnnnnnnnnnnnnnnnnnnnnnnnnnnnnnnnnnnnnnnnnnnnnnnnnnnnnnnnnnnnnnnnnnnnnnnnnnnnnnnnnnnnnnnnnnnnnnnnnnnnnnnnnnnnnnnnnnnnnnnnnnnnnnnnnnnnnnnnnnnnnnnnnnnnnnnnnnnnnnnnnnnnnnnnnnnnnnnnnnnnnnnnnnnnnnnnnnnnnnnnnnnnnnnnnnnnnnnnnnnnnnnnnnnnnnnnnnnnnnnnnnnnnnnnnnnnnnnnnnnnnnnnnnnnnnnnnnnnnnnnnnnnnnnnnnnnnnnnnnnnnnnnnnnnnnnnnnnnnnnnnnnnnnnnnnnnnnnnnnnnnnnnnnnnnnnnnnnnnnnnnnnnnnnnnnnnnnnnnnnnnnnnnnnnnnnnnnnnnnnnnnnnnnnnnnnnnnnnnnnnnnnnnnnnnnnnnnnnnnnnnnnnnnnnnnnnnnnnnnnnnnnnnnnnnnnnnnnnnnnnnnnnnnnnnnnnnnnnnnnnnnnnnnnnnnnnnnnnnnnnnnnnnnnnnnnnnnnnnnnnnnnnnnnnnnnnnnnnnnnnnnnnnnnnnnnnnnnnnnnnnnnnnnnnnnnnnnnnnnnnnnnnnnnnnnnnnnnnnnnnnnnnnnnnnnnnnnnnnnnnnnnnnnnnnnnnnnnnnnnnnnnnnnnnnnnnnnnnnnnnnnnnnnnnnnnnnnnnnnnnnnnnnnnnnnnnnnnnnnnnnnnnnnnnnnnnnnnnnnnnnnnnnnnnnnnnnnnnnnnnnnnnnnnnnnnnnnnnnnnnnnnnnnnnnnnnnnnnnnnnnnnnnnnnnnnnnnnnnnnnnnnnnnnnnnnnnnnnnnnnnnnnnnnnnnnnnnnnnnnnnnnnnnnnnnnnnnnnnnnnnnnnnnnnnnnnnnnnnnnnnnnnnnnnnnnnnnnnnnnnnnnnnnnnnnnnnnnnnnnnnnnnnnnnnnnnnnnnnnnnnnnnnnnnnnnnnnnnnnnnnnnnnnnnnnnnnnnnnnnnnnnnnnnnnnnnnnnnnnnnnnnnnnnnnnnnnnnnnnnnnnnnnnnnnnnnnnnnnnnnnnnnnnnnnnnnnnnnnnnnnnnnnnnnnnnnnnnnnnnnnnnnnnnnnnnnnnnnnnnnnnnnnnnnnnnnnnnnnnnnnnnnnnnnnnnnnnnnnnnnnnnnnnnnnnnnnnnnnnnnnnnnnnnnnnnnnnnnnnnnnnnnnnnnnnnnnnnnnnnnnnnnnnnnnnnnnnnnnnnnnnnnnnnnnnnnnnnnnnnnnnnnnnnnnnnnnnnnnnnnnnnnnnnnnnnnnnnnnnnnnnnnnnnnnnnnnnnnnnnnnnnnnnnnnnnnnnnnnnnnnnnnnnnnnnnnnnnnnnnnnnnnnnnnnnnnnnnnnnnnnnnnnnnnnnnnnnnnnnnnnnnnnnnnnnnnnnnnnnnnnnnnnnnnnnnnnnnnnnnnnnnnnnnnnnnnnnnnnnnnnnnnnnnnnnnnnnnnnnnnnnnnnnnnnnnnnnnnnnnnnnnnnnnnnnnnnnnnnnnnnnnnnnnnnnnnnnnnnnnnnnnnnnnnnnnnnnnnnnnnnnnnnnnnnnnnnnnnnnnnnnnnnnnnnnnnnnnnnnnnnnnnnnnnnnnnnnnnnnnnnnnnnnnnnnnnnnnnnnnnnnnnnnnnnnnnnnnnnnnnnnnnnnnnnnnnnnnnnnnnnnnnnnnnnnnnnnnnnnnnnnnnnnnnnnnnnnnnnnnnnnnnnnnnnnnnnnnnnnnnnnnnnnnnnnnnnnnnnnnnnnnnnnnnnnnnnnnnnnnnnnnnnnnnnnnnnnnnnnnnnnnnnnnnnnnnnnnnnnnnnnnnnnnnnnnnnnnnnnnnnnnnnnnnnnnnnnnnnnnnnnnnnnnnnnnnnnnnnnnnnnnnnnnnnnnnnnnnnnnnnnnnnnnnnnnnnnnnnnnnnnnnnnnnnnnnnnnnnnnnnnnnnnnnnnnnnnnnnnnnnnnnnnnnnnnnnnnnnnnnnnnnnnnnnnnnnnnnnnnnnnnnnnnnnnnnnnnnnnnnnnnnnnnnnnnnnnnnnnnnnnnnnnnnnnnnnnnnnnnnnnnnnnnnnnnnnnnnnnnnnnnnnnnnnnnnnnnnnnnnnnnnnnnnnnnnnnnnnnnnnnnnnnnnnnnnnnnnnnnnnnnnnnnnnnnnnnnnnnnnnnnnnnnnnnnnnnnnnnnnnnnnnnnnnnnnnnnnnnnnnnnnnnnnnnnnnnnnnnnnnnnnnnnnnnnnnnnnnnnnnnnnnnnnnnnnnnnnnnnnnnnnnnnnnnnnnnnnnnnnnnnnnnnnnnnnnnnnnnnnnnnnnnnnnnnnnnnnnnnnnnnnnnnnnnnnnnnnnnnnnnnnnnnnnnnnnnnnnnnnnnnnnnnnnnnnnnnnnnnnnnnnnnnnnnnnnnnnnnnnnnnnnnnnnnnnnnnnnnnnnnnnnnnnnnnnnnnnnnnnnnnnnnnnnnnnnnnnnnnnnnnnnnnnnnnnnnnnnnnnnnnnnnnnnnnnnnnnnnnnnnnnnnnnnnnnnnnnnnnnnnnnnnnnnnnnnnnnnnnnnnnnnnnnnnnnnnnnnnnnnnnnnnnnnnnnnnnnnnnnnnnnnnnnnnnnnnnnnnnnnnnnnnnnnnnnnnnnnnnnnnnnnnnnnnnnnnnnnnnnnnnnnnnnnnnnnnnnnnnnnnnnnnnnnnnnnnnnnnnnnnnnnnnnnnnnnnnnnnnnnnnnnnnnnnnnnnnnnnnnnnnnnnnnnnnnnnnnnnnnnnnnnnnnnnnnnnnnnnnnnnnnnnnnnnnnnnnnnnnnnnnnnnnnnnnnnnnnnnnnnnnnnnnnnnnnnnnnnnnnnnnnnnnnnnnnnnnnnnnnnnnnnnnnnnnnnnnnnnnnnnnnnnnnnnnnnnnnnnnnnnnnnnnnnnnnnnnnnnnnnnnnnnnnnnnnnnnnnnnnnnnnnnnnnnnnnnnnnnnnnnnnnnnnnnnnnnnnnnnnnnnnnnnnnnnnnnnnnnnnnnnnnnnnnnnnnnnnnnnnnnnnnnnnnnnnnnnnnnnnnnnnnnnnnnnnnnnnnnnnnnnnnnnnnnnnnnnnnnnnnnnnnnnnnnnnnnnnnnnnnnnnnnnnnnnnnnnnnnnnnnnnnnnnnnnnnnnnnnnnnnnnnnnnnnnnnnnnnnnnnnnnnnnnnnnnnnnnnnnnnnnnnnnnnnnnnnnnnnnnnnnnnnnnnnnnnnnnnnnnnnnnnnnnnnnnnnnnnnnnnnnnnnnnnnnnnnnnnnnnnnnnnnnnnnnnnnnnnnnnnnnnnnnnnnnnnnnnnnnnnnnnnnnnnnnnnnnnnnnnnnnnnnnnnnnnnnnnnnnnnnnnnnnnnnnnnnnnnnnnnnnnnnnnnnnnnnnnnnnnnnnnnnnnnnnnnnnnnnnnnnnnnnnnnnnnnnnnnnnnnnnnnnnnnnnnnnnnnnnnnnnnnnnnnnnnnnnnnnnnnnnnnnnnnnnnnnnnnnnnnnnnnnnnnnnnnnnnnnnnnnnnnnnnnnnnnnnnnnnnnnnnnnnnnnnnnnnnnnnnnnnnnnnnnnnnnnnnnnnnnnnnnnnnnnnnnnnnnnnnnnnnnnnnnnnnnnnnnnnnnnnnnnnnnnnnnnnnnnnnnnnnnnnnnnnnnnnnnnnnnnnnnnnnnnnnnnnnnnnnnnnnnnnnnnnnnnnnnnnnnnnnnnnnnnnnnnnnnnnnnnnnnnnnnnnnnnnnnnnnnnnnnnnnnnnnnnnnnnnnnnnnnnnnnnnnnnnnnnnnnnnnnnnnnnnnnnnnnnnnnnnnnnnnnnnnnnnnnnnnnnnnnnnnnnnnnnnnnnnnnnnnnnnnnnnnnnnnnnnnnnnnnnnnnnnnnnnnnnnnnnnnnnnnnnnnnnnnnnnnnnnnnnnnnnnnnnnnnnnnnnnnnnnnnnnnnnnnnnnnnnnnnnnnnnnnnnnnnnnnnnnnnnnnnnnnnnnnnnnnnnnnnnnnnnnnnnnnnnnnnnnnnnnnnnnnnnnnnnnnnnnnnnnnnnnnnnnnnnnnnnnnnnnnnnnnnnnnnnnnnnnnnnnnnnnnnnnnnnnnnnnnnnnnnnnnnnnnnnnnnnnnnnnnnnnnnnnnnnnnnnnnnnnnnnnnnnnnnnnnnnnnnnnnnnnnnnnnnnnnnnnnnnnnnnnnnnnnnnnnnnnnnnnnnnnnnnnnnnnnnnnnnnnnnnnnnnnnnnnnnnnnnnnnnnnnnnnnnnnnnnnnnnnnnnnnnnnnnnnnnnnnnnnnnnnnnnnnnnnnnnnnnnnnnnnnnnnnnnnnnnnnnnnnnnnnnnnnnnnnnnnnnnnnnnnnnnnnnnnnnnnnnnnnnnnnnnnnnnnnnnnnnnnnnnnnnnnnnnnnnnnnnnnnnnnnnnnnnnnnnnnnnnnnnnnnnnnnnnnnnnnnnnnnnnnnnnnnnnnnnnnnnnnnnnnnnnnnnnnnnnnnnnnnnnnnnnnnnnnnnnnnnnnnnnnnnnnnnnnnnnnnnnnnnnnnnnnnnnnnnnnnnnnnnnnnnnnnnnnnnnnnnnnnnnnnnnnnnnnnnnnnnnnnnnnnnnnnnnnnnnnnnnnnnnnnnnnnnnnnnnnnnnnnnnnnnnnnnnnnnnnnnnnnnnnnnnnnnnnnnnnnnnnnnnnnnnnnnnnnnnnnnnnnnnnnnnnnnnnnnnnnnnnnnnnnnnnnnnnnnnnnnnnnnnnnnnnnnnnnnnnnnnnnnnnnnnnnnnnnnnnnnnnnnnnnnnnnnnnnnnnnnnnnnnnnnnnnnnnnnnnnnnnnnnnnnnnnnnnnnnnnnnnnnnnnnnnnnnnnnnnnnnnnnnnnnnnnnnnnnnnnnnnnnnnnnnnnnnnnnnnnnnnnnnnnnnnnnnnnnnnnnnnnnnnnnnnnnnnnnnnnnnnnnnnnnnnnnnnnnnnnnnnnnnnnnnnnnnnnnnnnnnnnnnnnnnnnnnnnnnnnnnnnnnnnnnnnnnnnnnnnnnnnnnnnnnnnnnnnnnnnnnnnnnnnnnnnnnnnnnnnnnnnnnnnnnnnnnnnnnnnnnnnnnnnnnnnnnnnnnnnnnnnnnnnnnnnnnnnnnnnnnnnnnnnnnnnnnnnnnnnnnnnnnnnnnnnnnnnnnnnnnnnnnnnnnnnnnnnnnnnnnnnnnnnnnnnnnnnnnnnnnnnnnnnnnnnnnnnnnnnnnnnnnnnnnnnnnnnnnnnnnnnnnnnnnnnnnnnnnnnnnnnnnnnnnnnnnnnnnnnnnnnnnnnnnnnnnnnnnnnnnnnnnnnnnnnnnnnnnnnnnnnnnnnnnnnnnnnnnnnnnnnnnnnnnnnnnnnnnnnnnnnnnnnnnnnnnnnnnnnnnnnnnnnnnnnnnnnnnnnnnnnnnnnnnnnnnnnnnnnnnnnnnnnnnnnnnnnnnnnnnnnnnnnnnnnnnnnnnnnnnnnnnnnnnnnnnnnnnnnnnnnnnnnnnnnnnnnnnnnnnnnnnnnnnnnnnnnnnnnnnnnnnnnnnnnnnnnnnnnnnnnnnnnnnnnnnnnnnnnnnnnnnnnnnnnnnnnnnnnnnnnnnnnnnnnnnnnnnnnnnnnnnnnnnnnnnnnnnnnnnnnnnnnnnnnnnnnnnnnnnnnnnnnnnnnnnnnnnnnnnnnnnnnnnnnnnnnnnnnnnnnnnnnnnnnnnnnnnnnnnnnnnnnnnnnnnnnnnnnnnnnnnnnnnnnnnnnnnnnnnnnnnnnnnnnnnnnnnnnnnnnnnnnnnnnnnnnnnnnnnnnnnnnnnnnnnnnnnnnnnnnnnnnnnnnnnnnnnnnnnnnnnnnnnnnnnnnnnnnnnnnnnnnnnnnnnnnnnnnnnnnnnnnnnnnnnnnnnnnnnnnnnnnnnnnnnnnnnnnnnnnnnnnnnnnnnnnnnnnnnnnnnnnnnnnnnnnnnnnnnnnnnnnnnnnnnnnnnnnnnnnnnnnnnnnnnnnnnnnnnnnnnnnnnnnnnnnnnnnnnnnnnnnnnnnnnnnnnnnnnnnnnnnnnnnnnnnnnnnnnnnnnnnnnnnnnnnnnnnnnnnnnnnnnnnnnnnnnnnnnnnnnnnnnnnnnnnnnnnnnnnnnnnnnnnnnnnnnnnnnnnnnnnnnnnnnnnnnnnnnnnnnnnnnnnnnnnnnnnnnnnnnnnnnnnnnnnnnnnnnnnnnnnnnnnnnnnnnnnnnnnnnnnnnnnnnnnnnnnnnnnnnnnnnnnnnnnnnnnnnnnnnnnnnnnnnnnnnnnnnnnnnnnnnnnnnnnnnnnnnnnnnnnnnnnnnnnnnnnnnnnnnnnnnnnnnnnnnnnnnnnnnnnnnnnnnnnnnnnnnnnnnnnnnnnnnnnnnnnnnnnnnnnnnnnnnnnnnnnnnnnnnnnnnnnnnnnnnnnnnnnnnnnnnnnnnnnnnnnnnnnnnnnnnnnnnnnnnnnnnnnnnnnnnnnnnnnnnnnnnnnnnnnnnnnnnnnnnnnnnnnnnnnnnnnnnnnnnnnnnnnnnnnnnnnnnnnnnnnnnnnnnnnnnnnnnnnnnnnnnnnnnnnnnnnnnnnnnnnnnnnnnnnnnnnnnnnnnnnnnnnnnnnnnnnnnnnnnnnnnnnnnnnnnnnnnnnnnnnnnnnnnnnnnnnnnnnnnnnnnnnnnnnnnnnnnnnnnnnnnnnnnnnnnnnnnnnnnnnnnnnnnnnnnnnnnnnnnnnnnnnnnnnnnnnnnnnnnnnnnnnnnnnnnnnnnnnnnnnnnnnnnnnnnnnnnnnnnnnnnnnnnnnnnnnnnnnnnnnnnnnnnnnnnnnnnnnnnnnnnnnnnnnnnnnnnnnnnnnnnnnnnnnnnnnnnnnnnnnnnnnnnnnnnnnnnnnnnnnnnnnnnnnnnnnnnnnnnnnnnnnnnnnnnnnnnnnnnnnnnnnnnnnnnnnnnnnnnnnnnnnnnnnnnnnnnnnnnnnnnnnnnnnnnnnnnnnnnnnnnnnnnnnnnnnnnnnnnnnnnnnnnnnnnnnnnnnnnnnnnnnnnnnnnnnnnnnnnnnnnnnnnnnnnnnnnnnnnnnnnnnnnnnnnnnnnnnnnnnnnnnnnnnnnnnnnnnnnnnnnnnnnnnnnnnnnnnnnnnnnnnnnnnnnnnnnnnnnnnnnnnnnnnnnnnnnnnnnnnnnnnnnnnnnnnnnnnnnnnnnnnnnnnnnnnnnnnnnnnnnnnnnnnnnnnnnnnnnnnnnnnnnnnnnnnnnnnnnnnnnnnnnnnnnnnnnnnnnnnnnnnnnnnnnnnnnnnnnnnnnnnnnnnnnnnnnnnnnnnnnnnnnnnnnnnnnnnnnnnnnnnnnnnnnnnnnnnnnnnnnnnnnnnnnnnnnnnnnnnnnnnnnnnnnnnnnnnnnnnnnnnnnnnnnnnnnnnnnnnnnnnnnnnnnnnnnnnnnnnnnnnnnnnnnnnnnnnnnnnnnnnnnnnnnnnnnnnnnnnnnnnnnnnnnnnnnnnnnnnnnnnnnnnnnnnnnnnnnnnnnnnnnnnnnnnnnnnnnnnnnnnnnnnnnnnnnnnnnnnnnnnnnnnnnnnnnnnnnnnnnnnnnnnnnnnnnnnnnnnnnnnnnnnnnnnnnnnnnnnnnnnnnnnnnnnnnnnnnnnnnnnnnnnnnnnnnnnnnnnnnnnnnnnnnnnnnnnnnnnnnnnnnnnnnnnnnnnnnnnnnnnnnnnnnnnnnnnnnnnnnnnnnnnnnnnnnnnnnnnnnnnnnnnnnnnnnnnnnnnnnnnnnnnnnnnnnnnnnnnnnnnnnnnnnnnnnnnnnnnnnnnnnnnnnnnnnnnnnnnnnnnnnnnnnnnnnnnnnnnnnnnnnnnnnnnnnnnnnnnnnnnnnnnnnnnnnnnnnnnnnnnnnnnnnnnnnnnnnnnnnnnnnnnnnnnnnnnnnnnnnnnnnnnnnnnnnnnnnnnnnnnnnnnnnnnnnnnnnnnnnnnnnnnnnnnnnnnnnnnnnnnnnnnnnnnnnnnnnnnnnnnnnnnnnnnnnnnnnnnnnnnnnnnnnnnnnnnnnnnnnnnnnnnnnnnnnnnnnnnnnnnnnnnnnnnnnnnnnnnnnnnnnnnnnnnnnnnnnnnnnnnnnnnnnnnnnnnnnnnnnnnnnnnnnnnnnnnnnnnnnnnnnnnnnnnnnnnnnnnnnnnnnnnnnnnnnnnnnnnnnnnnnnnnnnnnnnnnnnnnnnnnnnnnnnnnnnnnnnnnnnnnnnnnnnnnnnnnnnnnnnnnnnnnnnnnnnnnnnnnnnnnnnnnnnnnnnnnnnnnnnnnnnnnnnnnnnnnnnnnnnnnnnnnnnnnnnnnnnnnnnnnnnnnnnnnnnnnnnnnnnnnnnnnnnnnnnnnnnnnnnnnnnnnnnnnnnnnnnnnnnnnnnnnnnnnnnnnnnnnnnnnnnnnnnnnnnnnnnnnnnnnnnnnnnnnnnnnnnnnnnnnnnnnnnnnnnnnnnnnnnnnnnnnnnnnnnnnnnnnnnnnnnnnnnnnnnnnnnnnnnnnnnnnnnnnnnnnnnnnnnnnnnnnnnnnnnnnnnnnnnnnnnnnnnnnnnnnnnnnnnnnnnnnnnnnnnnnnnnnnnnnnnnnnnnnnnnnnnnnnnnnnnnnnnnnnnnnnnnnnnnnnnnnnnnnnnnnnnnnnnnnnnnnnnnnnnnnnnnnnnnnnnnnnnnnnnnnnnnnnnnnnnnnnnnnnnnnnnnnnnnnnnnnnnnnnnnnnnnnnnnnnnnnnnnnnnnnnnnnnnnnnnnnnnnnnnnnnnnnnnnnnnnnnnnnnnnnnnnnnnnnnnnnnnnnnnnnnnnnnnnnnnnnnnnnnnnnnnnnnnnnnnnnnnnnnnnnnnnnnnnnnnnnnnnnnnnnnnnnnnnnnnnnnnnnnnnnnnnnnnnnnnnnnnnnnnnnnnnnnnnnnnnnnnnnnnnnnnnnnnnnnnnnnnnnnnnnnnnnnnnnnnnnnnnnnnnnnnnnnnnnnnnnnnnnnnnnnnnnnnnnnnnnnnnnnnnnnnnnnnnnnnnnnnnnnnnnnnnnnnnnnnnnnnnnnnnnnnnnnnnnnnnnnnnnnnnnnnnnnnnnnnnnnnnnnnnnnnnnnnnnnnnnnnnnnnnnnnnnnnnnnnnnnnnnnnnnnnnnnnnnnnnnnnnnnnnnnnnnnnnnnnnnnnnnnnnnnnnnnnnnnnnnnnnnnnnnnnnnnnnnnnnnnnnnnnnnnnnnnnnnnnnnnnnnnnnnnnnnnnnnnnnnnnnnnnnnnnnnnnnnnnnnnnnnnnnnnnnnnnnnnnnnnnnnnnnnnnnnnnnnnnnnnnnnnnnnnnnnnnnnnnnnnnnnnnnnnnnnnnnnnnnnnnnnnnnnnnnnnnnnnnnnnnnnnnnnnnnnnnnnnnnnnnnnnnnnnnnnnnnnnnnnnnnnnnnnnnnnnnnnnnnnnnnnnnnnnnnnnnnnnnnnnnnnnnnnnnnnnnnnnnnnnnnnnnnnnnnnnnnnnnnnnnnnnnnnnnnnnnnnnnnnnnnnnnnnnnnnnnnnnnnnnnnnnnnnnnnnnnnnnnnnnnnnnnnnnnnnnnnnnnnnnnnnnnnnnnnnnnnnnnnnnnnnnnnnnnnnnnnnnnnnnnnnnnnnnnnnnnnnnnnnnnnnnnnnnnnnnnnnnnnnnnnnnnnnnnnnnnnnnnnnnnnnnnnnnnnnnnnnnnnnnnnnnnnnnnnnnnnnnnnnnnnnnnnnnnnnnnnnnnnnnnnnnnnnnnnnnnnnnnnnnnnnnnnnnnnnnnnnnnnnnnnnnnnnnnnnnnnnnnnnnnnnnnnnnnnnnnnnnnnnnnnnnnnnnnnnnnnnnnnnnnnnnnnnnnnnnnnnnnnnnnnnnnnnnnnnnnnnnnnnnnnnnnnnnnnnnnnnnnnnnnnnnnnnnnnnnnnnnnnnnnnnnnnnnnnnnnnnnnnnnnnnnnnnnnnnnnnnnnnnnnnnnnnnnnnnnnnnnnnnnnnnnnnnnnnnnnnnnnnnnnnnnnnnnnnnnnnnnnnnnnnnnnnnnnnnnnnnnnnnnnnnnnnnnnnnnnnnnnnnnnnnnnnnnnnnnnnnnnnnnnnnnnnnnnnnnnnnnnnnnnnnnnnnnnnnnnnnnnnnnnnnnnnnnnnnnnnnnnnnnnnnnnnnnnnnnnnnnnnnnnnnnnnnnnnnnnnnnnnnnnnnnnnnnnnnnnnnnnnnnnnnnnnnnnnnnnnnnnnnnnnnnnnnnnnnnnnnnnnnnnnnnnnnnnnnnnnnnnnnnnnnnnnnnnnnnnnnnnnnnnnnnnnnnnnnnnnnnnnnnnnnnnnnnnnnnnnnnnnnnnnnnnnnnnnnnnnnnnnnnnnnnnnnnnnnnnnnnnnnnnnnnnnnnnnnnnnnnnnnnnnnnnnnnnnnnnnnnnnnnnnnnnnnnnnnnnnnnnnnnnnnnnnnnnnnnnnnnnnnnnnnnnnnnnnnnnnnnnnnnnnnnnnnnnnnnnnnnnnnnnnnnnnnnnnnnnnnnnnnnnnnnnnnnnnnnnnnnnnnnnnnnnnnnnnnnnnnnnnnnnnnnnnnnnnnnnnnnnnnnnnnnnnnnnnnnnnnnnnnnnnnnnnnnnnnnnnnnnnnnnnnnnnnnnnnnnnnnnnnnnnnnnnnnnnnnnnnnnnnnnnnnnnnnnnnnnnnnnnnnnnnnnnnnnnnnnnnnnnnnnnnnnnnnnnnnnnnnnnnnnnnnnnnnnnnnnnnnnnnnnnnnnnnnnnnnnnnnnnnnnnnnnnnnnnnnnnnnnnnnnnnnnnnnnnnnnnnnnnnnnnnnnnnnnnnnnnnnnnnnnnnnnnnnnnnnnnnnnnnnnnnnnnnnnnnnnnnnnnnnnnnnnnnnnnnnnnnnnnnnnnnnnnnnnnnnnnnnnnnnnnnnnnnnnnnnnnnnnnnnnnnnnnnnnnnnnnnnnnnnnnnnnnnnnnnnnnnnnnnnnnnnnnnnnnnnnnnnnnnnnnnnnnnnnnnnnnnnnnnnnnnnnnnnnnnnnnnnnnnnnnnnnnnnnnnnnnnnnnnnnnnnnnnnnnnnnnnnnnnnnnnnnnnnnnnnnnnnnnnnnnnnnnnnnnnnnnnnnnnnnnnnnnnnnnnnnnnnnnnnnnnnnnnnnnnnnnnnnnnnnnnnnnnnnnnnnnnnnnnnnnnnnnnnnnnnnnnnnnnnnnnnnnnnnnnnnnnnnnnnnnnnnnnnnnnnnnnnnnnnnnnnnnnnnnnnnnnnnnnnnnnnnnnnnnnnnnnnnnnnnnnnnnnnnnnnnnnnnnnnnnnnnnnnnnnnnnnnnnnnnnnnnnnnnnnnnnnnnnnnnnnnnnnnnnnnnnnnnnnnnnnnnnnnnnnnnnnnnnnnnnnnnnnnnnnnnnnnnnnnnnnnnnnnnnnnnnnnnnnnnnnnnnnnnnnnnnnnnnnnnnnnnnnnnnnnnnnnnnnnnnnnnnnnnnnnnnnnnnnnnnnnnnnnnnnnnnnnnnnnnnnnnnnnnnnnnnnnnnnnnnnnnnnnnnnnnnnnnnnnnnnnnnnnnnnnnnnnnnnnnnnnnnnnnnnnnnnnnnnnnnnnnnnnnnnnnnnnnnnnnnnnnnnnnnnnnnnnnnnnnnnnnnnnnnnnnnnnnnnnnnnnnnnnnnnnnnnnnnnnnnnnnnnnnnnnnnnnnnnnnnnnnnnnnnnnnnnnnnnnnnnnnnnnnnnnnnnnnnnnnnnnnnnnnnnnnnnnnnnnnnnnnnnnnnnnnnnnnnnnnnnnnnnnnnnnnnnnnnnnnnnnnnnnnnnnnnnnnnnnnnnnnnnnnnnnnnnnnnnnnnnnnnnnnnnnnnnnnnnnnnnnnnnnnnnnnnnnnnnnnnnnnnnnnnnnnnnnnnnnnnnnnnnnnnnnnnnnnnnnnnnnnnnnnnnnnnnnnnnnnnnnnnnnnnnnnnnnnnnnnnnnnnnnnnnnnnnnnnnnnnnnnnnnnnnnnnnnnnnnnnnnnnnnnnnnnnnnnnnnnnnnnnnnnnnnnnnnnnnnnnnnnnnnnnnnnnnnnnnnnnnnnnnnnnnnnnnnnnnnnnnnnnnnnnnnnnnnnnnnnnnnnnnnnnnnnnnnnnnnnnnnnnnnnnnnnnnnnnnnnnnnnnnnnnnnnnnnnnnnnnnnnnnnnnnnnnnnnnnnnnnnnnnnnnnnnnnnnnnnnnnnnnnnnnnnnnnnnnnnnnnnnnnnnnnnnnnnnnnnnnnnnnnnnnnnnnnnnnnnnnnnnnnnnnnnnnnnnnnnnnnnnnnnnnnnnnnnnnnnnnnnnnnnnnnnnnnnnnnnnnnnnnnnnnnnnnnnnnnnnnnnnnnnnnnnnnnnnnnnnnnnnnnnnnnnnnnnnnnnnnnnnnnnnnnnnnnnnnnnnnnnnnnnnnnnnnnnnnnnnnnnnnnnnnnnnnnnnnnnnnnnnnnnnnnnnnnnnnnnnnnnnnnnnnnnnnnnnnnnnnnnnnnnnnnnnnnnnnnnnnnnnnnnnnnnnnnnnnnnnnnnnnnnnnnnnnnnnnnnnnnnnnnnnnnnnnnnnnnnnnnnnnnnnnnnnnnnnnnnnnnnnnnnnnnnnnnnnnnnnnnnnnnnnnnnnnnnnnnnnnnnnnnnnnnnnnnnnnnnnnnnnnnnnnnnnnnnnnnnnnnnnnnnnnnnnnnnnnnnnnnnnnnnnnnnnnnnnnnnnnnnnnnnnnnnnnnnnnnnnnnnnnnnnnnnnnnnnnnnnnnnnnnnnnnnnnnnnnnnnnnnnnnnnnnnnnnnnnnnnnnnnnnnnnnnnnnnnnnnnnnnnnnnnnnnnnnnnnnnnnnnnnnnnnnnnnnnnnnnnnnnnnnnnnnnnnnnnnnnnnnnnnnnnnnnnnnnnnnnnnnnnnnnnnnnnnnnnnnnnnnnnnnnnnnnnnnnnnnnnnnnnnnnnnnnnnnnnnnnnnnnnnnnnnnnnnnnnnnnnnnnnnnnnnnnnnnnnnnnnnnnnnnnnnnnnnnnnnnnnnnnnnnnnnnnnnnnnnnnnnnnnnnnnnnnnnnnnnnnnnnnnnnnnnnnnnnnnnnnnnnnnnnnnnnnnnnnnnnnnnnnnnnnnnnnnnnnnnnnnnnnnnnnnnnnnnnnnnnnnnnnnnnnnnnnnnnnnnnnnnnnnnnnnnnnnnnnnnnnnnnnnnnnnnnnnnnnnnnnnnnnnnnnnnnnnnnnnnnnnnnnnnnnnnnnnnnnnnnnnnnnnnnnnnnnnnnnnnnnnnnnnnnnnnnnnnnnnnnnnnnnnnnnnnnnnnnnnnnnnnnnnnnnnnnnnnnnnnnnnnnnnnnnnnnnnnnnnnnnnnnnnnnnnnnnnnnnnnnnnnnnnnnnnnnnnnnnnnnnnnnnnnnnnnnnnnnnnnnnnnnnnnnnnnnnnnnnnnnnnnnnnnnnnnnnnnnnnnnnnnnnnnnnnnnnnnnnnnnnnnnnnnnnnnnnnnnnnnnnnnnnnnnnnnnnnnnnnnnnnnnnnnnnnnnnnnnnnnnnnnnnnnnnnnnnnnnnnnnnnnnnnnnnnnnnnnnnnnnnnnnnnnnnnnnnnnnnnnnnnnnnnnnnnnnnnnnnnnnnnnnnnnnnnnnnnnnnnnnnnnnnnnnnnnnnnnnnnnnnnnnnnnnnnnnnnnnnnnnnnnnnnnnnnnnnnnnnnnnnnnnnnnnnnnnnnnnnnnnnnnnnnnnnnnnnnnnnnnnnnnnnnnnnnnnnnnnnnnnnnnnnnnnnnnnnnnnnnnnnnnnnnnnnnnnnnnnnnnnnnnnnnnnnnnnnnnnnnnnnnnnnnnnnnnnnnnnnnnnnnnnnnnnnnnnnnnnnnnnnnnnnnnnnnnnnnnnnnnnnnnnnnnnnnnnnnnnnnnnnnnnnnnnnnnnnnnnnnnnnnnnnnnnnnnnnnnnnnnnnnnnnnnnnnnnnnnnnnnnnnnnnnnnnnnnnnnnnnnnnnnnnnnnnnnnnnnnnnnnnnnnnnnnnnnnnnnnnnnnnnnnnnnnnnnnnnnnnnnnnnnnnnnnnnnnnnnnnnnnnnnnnnnnnnnnnnnnnnnnnnnnnnnnnnnnnnnnnnnnnnnnnnnnnnnnnnnnnnnnnnnnnnnnnnnnnnnnnnnnnnnnnnnnnnnnnnnnnnnnnnnnnnnnnnnnnnnnnnnnnnnnnnnnnnnnnnnnnnnnnnnnnnnnnnnnnnnnnnnnnnnnnnnnnnnnnnnnnnnnnnnnnnnnnnnnnnnnnnnnnnnnnnnnnnnnnnnnnnnnnnnnnnnnnnnnnnnnnnnnnnnnnnnnnnnnnnnnnnnnnnnnnnnnnnnnnnnnnnnnnnnnnnnnnnnnnnnnnnnnnnnnnnnnnnnnnnnnnnnnnnnnnnnnnnnnnnnnnnnnnnnnnnnnnnnnnnnnnnnnnnnnnnnnnnnnnnnnnnnnnnnnnnnnnnnnnnnnnnnnnnnnnnnnnnnnnnnnnnnnnnnnnnnnnnnnnnnnnnnnnnnnnnnnnnnnnnnnnnnnnnnnnnnnnnnnnnnnnnnnnnnnnnnnnnnnnnnnnnnnnnnnnnnnnnnnnnnnnnnnnnnnnnnnnnnnnnnnnnnnnnnnnnnnnnnnnnnnnnnnnnnnnnnnnnnnnnnnnnnnnnnnnnnnnnnnnnnnnnnnnnnnnnnnnnnnnnnnnnnnnnnnnnnnnnnnnnnnnnnnnnnnnnnnnnnnnnnnnnnnnnnnnnnnnnnnnnnnnnnnnnnnnnnnnnnnnnnnnnnnnnnnnnnnnnnnnnnnnnnnnnnnnnnnnnnnnnnnnnnnnnnnnnnnnnnnnnnnnnnnnnnnnnnnnnnnnnnnnnnnnnnnnnnnnnnnnnnnnnnnnnnnnnnnnnnnnnnnnnnnnnnnnnnnnnnnnnnnnnnnnnnnnnnnnnnnnnnnnnnnnnnnnnnnnnnnnnnnnnnnnnnnnnnnnnnnnnnnnnnnnnnnnnnnnnnnnnnnnnnnnnnnnnnnnnnnnnnnnnnnnnnnnnnnnnnnnnnnnnnnnnnnnnnnnnnnnnnnnnnnnnnnnnnnnnnnnnnnnnnnnnnnnnnnnnnnnnnnnnnnnnnnnnnnnnnnnnnnnnnnnnnnnnnnnnnnnnnnnnnnnnnnnnnnnnnnnnnnnnnnnnnnnnnnnnnnnnnnnnnnnnnnnnnnnnnnnnnnnnnnnnnnnnnnnnnnnnnnnnnnnnnnnnnnnnnnnnnnnnnnnnnnnnnnnnnnnnnnnnnnnnnnnnnnnnnnnnnnnnnnnnnnnnnnnnnnnnnnnnnnnnnnnnnnnnnnnnnnnnnnnnnnnnnnnnnnnnnnnnnnnnnnnnnnnnnnnnnnnnnnnnnnnnnnnnnnnnnnnnnnnnnnnnnnnnnnnnnnnnnnnnnnnnnnnnnnnnnnnnnnnnnnnnnnnnnnnnnnnnnnnnnnnnnnnnnnnnnnnnnnnnnnnnnnnnnnnnnnnnnnnnnnnnnnnnnnnnnnnnnnnnnnnnnnnnnnnnnnnnnnnnnnnnnnnnnnnnnnnnnnnnnnnnnnnnnnnnnnnnnnnnnnnnnnnnnnnnnnnnnnnnnnnnnnnnnnnnnnnnnnnnnnnnnnnnnnnnnnnnnnnnnnnnnnnnnnnnnnnnnnnnnnnnnnnnnnnnnnnnnnnnnnnnnnnnnnnnnnnnnnnnnnnnnnnnnnnnnnnnnnnnnnnnnnnnnnnnnnnnnnnnnnnnnnnnnnnnnnnnnnnnnnnnnnnnnnnnnnnnnnnnnnnnnnnnnnnnnnnnnnnnnnnnnnnnnnnnnnnnnnnnnnnnnnnnnnnnnnnnnnnnnnnnnnnnnnnnnnnnnnnnnnnnnnnnnnnnnnnnnnnnnnnnnnnnnnnnnnnnnnnnnnnnnnnnnnnnnnnnnnnnnnnnnnnnnnnnnnnnnnnnnnnnnnnnnnnnnnnnnnnnnnnnnnnnnnnnnnnnnnnnnnnnnnnnnnnnnnnnnnnnnnnnnnnnnnnnnnnnnnnnnnnnnnnnnnnnnnnnnnnnnnnnnnnnnnnnnnnnnnnnnnnnnnnnnnnnnnnnnnnnnnnnnnnnnnnnnnnnnnnnnnnnnnnnnnnnnnnnnnnnnnnnnnnnnnnnnnnnnnnnnnnnnnnnnnnnnnnnnnnnnnnnnnnnnnnnnnnnnnnnnnnnnnnnnnnnnnnnnnnnnnnnnnnnnnnnnnnnnnnnnnnnnnnnnnnnnnnnnnnnnnnnnnnnnnnnnnnnnnnnnnnnnnnnnnnnnnnnnnnnnnnnnnnnnnnnnnnnnnnnnnnnnnnnnnnnnnnnnnnnnnnnnnnnnnnnnnnnnnnnnnnnnnnnnnnnnnnnnnnnnnnnnnnnnnnnnnnnnnnnnnnnnnnnnnnnnnnnnnnnnnnnnnnnnnnnnnnnnnnnnnnnnnnnnnnnnnnnnnnnnnnnnnnnnnnnnnnnnnnnnnnnnnnnnnnnnnnnnnnnnnnnnnnnnnnnnnnnnnnnnnnnnnnnnnnnnnnnnnnnnnnnnnnnnnnnnnnnnnnnnnnnnnnnnnnnnnnnnnnnnnnnnnnnnnnnnnnnnnnnnnnnnnnnnnnnnnnnnnnnnnnnnnnnnnnnnnnnnnnnnnnnnnnnnnnnnnnnnnnnnnnnnnnnnnnnnnnnnnnnnnnnnnnnnnnnnnnnnnnnnnnnnnnnnnnnnnnnnnnnnnnnnnnnnnnnnnnnnnnnnnnnnnnnnnnnnnnnnnnnnnnnnnnnnnnnnnnnnnnnnnnnnnnnnnnnnnnnnnnnnnnnnnnnnnnnnnnnnnnnnnnnnnnnnnnnnnnnnnnnnnnnnnnnnnnnnnnnnnnnnnnnnnnnnnnnnnnnnnnnnnnnnnnnnnnnnnnnnnnnnnnnnnnnnnnnnnnnnnnnnnnnnnnnnnnnnnnnnnnnnnnnnnnnnnnnnnnnnnnnnnnnnnnnnnnnnnnnnnnnnnnnnnnnnnnnnnnnnnnnnnnnnnnnnnnnnnnnnnnnnnnnnnnnnnnnnnnnnnnnnnnnnnnnnnnnnnnnnnnnnnnnnnnnnnnnnnnnnnnnnnnnnnnnnnnnnnnnnnnnnnnnnnnnnnnnnnnnnnnnnnnnnnnnnnnnnnnnnnnnnnnnnnnnnnnnnnnnnnnnnnnnnnnnnnnnnnnnnnnnnnnnnnnnnnnnnnnnnnnnnnnnnnnnnnnnnnnnnnnnnnnnnnnnnnnnnnnnnnnnnnnnnnnnnnnnnnnnnnnnnnnnnnnnnnnnnnnnnnnnnnnnnnnnnnnnnnnnnnnnnnnnnnnnnnnnnnnnnnnnnnnnnnnnnnnnnnnnnnnnnnnnnnnnnnnnnnnnnnnnnnnnnnnnnnnnnnnnnnnnnnnnnnnnnnnnnnnnnnnnnnnnnnnnnnnnnnnnnnnnnnnnnnnnnnnnnnnnnnnnnnnnnnnnnnnnnnnnnnnnnnnnnnnnnnnnnnnnnnnnnnnnnnnnnnnnnnnnnnnnnnnnnnnnnnnnnnnnnnnnnnnnnnnnnnnnnnnnnnnnnnnnnnnnnnnnnnnnnnnnnnnnnnnnnnnnnnnnnnnnnnnnnnnnnnnnnnnnnnnnnnnnnnnnnnnnnnnnnnnnnnnnnnnnnnnnnnnnnnnnnnnnnnnnnnnnnnnnnnnnnnnnnnnnnnnnnnnnnnnnnnnnnnnnnnnnnnnnnnnnnnnnnnnnnnnnnnnnnnnnnnnnnnnnnnnnnnnnnnnnnnnnnnnnnnnnnnnnnnnnnnnnnnnnnnnnnnnnnnnnnnnnnnnnnnnnnnnnnnnnnnnnnnnnnnnnnnnnnnnnnnnnnnnnnnnnnnnnnnnnnnnnnnnnnnnnnnnnnnnnnnnnnnnnnnnnnnnnnnnnnnnnnnnnnnnnnnnnnnnnnnnnnnnnnnnnnnnnnnnnnnnnnnnnnnnnnnnnnnnnnnnnnnnnnnnnnnnnnnnnnnnnnnnnnnnnnnnnnnnnnnnnnnnnnnnnnnnnnnnnnnnnnnnnnnnnnnnnnnnnnnnnnnnnnnnnnnnnnnnnnnnnnnnnnnnnnnnnnnnnnnnnnnnnnnnnnnnnnnnnnnnnnnnnnnnnnnnnnnnnnnnnnnnnnnnnnnnnnnnnnnnnnnnnnnnnnnnnnnnnnnnnnnnnnnnnnnnnnnnnnnnnnnnnnnnnnnnnnnnnnnnnnnnnnnnnnnnnnnnnnnnnnnnnnnnnnnnnnnnnnnnnnnnnnnnnnnnnnnnnnnnnnnnnnnnnnnnnnnnnnnnnnnnnnnnnnnnnnnnnnnnnnnnnnnnnnnnnnnnnnnnnnnnnnnnnnnnnnnnnnnnnnnnnnnnnnnnnnnnnnnnnnnnnnnnnnnnnnnnnnnnnnnnnnnnnnnnnnnnnnnnnnnnnnnnnnnnnnnnnnnnnnnnnnnnnnnnnnnnnnnnnnnnnnnnnnnnnnnnnnnnnnnnnnnnnnnnnnnnnnnnnnnnnnnnnnnnnnnnnnnnnnnnnnnnnnnnnnnnnnnnnnnnnnnnnnnnnnnnnnnnnnnnnnnnnnnnnnnnnnnnnnnnnnnnnnnnnnnnnnnnnnnnnnnnnnnnnnnnnnnnnnnnnnnnnnnnnnnnnnnnnnnnnnnnnnnnnnnnnnnnnnnnnnnnnnnnnnnnnnnnnnnnnnnnnnnnnnnnnnnnnnnnnnnnnnnnnnnnnnnnnnnnnnnnnnnnnnnnnnnnnnnnnnnnnnnnnnnnnnnnnnnnnnnnnnnnnnnnnnnnnnnnnnnnnnnnnnnnnnnnnnnnnnnnnnnnnnnnnnnnnnnnnnnnnnnnnnnnnnnnnnnnnnnnnnnnnnnnnnnnnnnnnnnnnnnnnnnnnnnnnnnnnnnnnnnnnnnnnnnnnnnnnnnnnnnnnnnnnnnnnnnnnnnnnnnnnnnnnnnnnnnnnnnnnnnnnnnnnnnnnnnnnnnnnnnnnnnnnnnnnnnnnnnnnnnnnnnnnnnnnnnnnnnnnnnnnnnnnnnnnnnnnnnnnnnnnnnnnnnnnnnnnnnnnnnnnnnnnnnnnnnnnnnnnnnnnnnnnnnnnnnnnnnnnnnnnnnnnnnnnnnnnnnnnnnnnnnnnnnnnnnnnnnnnnnnnnnnnnnnnnnnnnnnnnnnnnnnnnnnnnnnnnnnnnnnnnnnnnnnnnnnnnnnnnnnnnnnnnnnnnnnnnnnnnnnnnnnnnnnnnnnnnnnnnnnnnnnnnnnnnnnnnnnnnnnnnnnnnnnnnnnnnnnnnnnnnnnnnnnnnnnnnnnnnnnnnnnnnnnnnnnnnnnnnnnnnnnnnnnnnnnnnnnnnnnnnnnnnnnnnnnnnnnnnnnnnnnnnnnnnnnnnnnnnnnnnnnnnnnnnnnnnnnnnnnnnnnnnnnnnnnnnnnnnnnnnnnnnnnnnnnnnnnnnnnnnnnnnnnnnnnnnnnnnnnnnnnnnnnnnnnnnnnnnnnnnnnnnnnnnnnnnnnnnnnnnnnnnnnnnnnnnnnnnnnnnnnnnnnnnnnnnnnnnnnnnnnnnnnnnnnnnnnnnnnnnnnnnnnnnnnnnnnnnnnnnnnnnnnnnnnnnnnnnnnnnnnnnnnnnnnnnnnnnnnnnnnnnnnnnnnnnnnnnnnnnnnnnnnnnnnnnnnnnnnnnnnnnnnnnnnnnnnnnnnnnnnnnnnnnnnnnnnnnnnnnnnnnnnnnnnnnnnnnnnnnnnnnnnnnnnnnnnnnnnnnnnnnnnnnnnnnnnnnnnnnnnnnnnnnnnnnnnnnnnnnnnnnnnnnnnnnnnnnnnnnnnnnnnnnnnnnnnnnnnnnnnnnnnnnnnnnnnnnnnnnnnnnnnnnnnnnnnnnnnnnnnnnnnnnnnnnnnnnnnnnnnnnnnnnnnnnnnnnnnnnnnnnnnnnnnnnnnnnnnnnnnnnnnnnnnnnnnnnnnnnnnnnnnnnnnnnnnnnnnnnnnnnnnnnnnnnnnnnnnnnnnnnnnnnnnnnnnnnnnnnnnnnnnnnnnnnnnnnnnnnnnnnnnnnnnnnnnnnnnnnnnnnnnnnnnnnnnnnnnnnnnnnnnnnnnnnnnnnnnnnnnnnnnnnnnnnnnnnnnnnnnnnnnnnnnnnnnnnnnnnnnnnnnnnnnnnnnnnnnnnnnnnnnnnnnnnnnnnnnnnnnnnnnnnnnnnnnnnnnnnnnnnnnnnnnnnnnnnnnnnnnnnnnnnnnnnnnnnnnnnnnnnnnnnnnnnnnnnnnnnnnnnnnnnnnnnnnnnnnnnnnnnnnnnnnnnnnnnnnnnnnnnnnnnnnnnnnnnnnnnnnnnnnnnnnnnnnnnnnnnnnnnnnnnnnnnnnnnnnnnnnnnnnnnnnnnnnnnnnnnnnnnnnnnnnnnnnnnnnnnnnnnnnnnnnnnnnnnnnnnnnnnnnnnnnnnnnnnnnnnnnnnnnnnnnnnnnnnnnnnnnnnnnnnnnnnnnnnnnnnnnnnnnnnnnnnnnnnnnnnnnnnnnnnnnnnnnnnnnnnnnnnnnnnnnnnnnnnnnnnnnnnnnnnnnnnnnnnnnnnnnnnnnnnnnnnnnnnnnnnnnnnnnnnnnnnnnnnnnnnnnnnnnnnnnnnnnnnnnnnnnnnnnnnnnnnnnnnnnnnnnnnnnnnnnnnnnnnnnnnnnnnnnnnnnnnnnnnnnnnnnnnnnnnnnnnnnnnnnnnnnnnnnnnnnnnnnnnnnnnnnnnnnnnnnnnnnnnnnnnnnnnnnnnnnnnnnnnnnnnnnnnnnnnnnnnnnnnnnnnnnnnnnnnnnnnnnnnnnnnnnnnnnnnnnnnnnnnnnnnnnnnnnnnnnnnnnnnnnnnnnnnnnnnnnnnnnnnnnnnnnnnnnnnnnnnnnnnnnnnnnnnnnnnnnnnnnnnnnnnnnnnnnnnnnnnnnnnnnnnnnnnnnnnnnnnnnnnnnnnnnnnnnnnnnnnnnnnnnnnnnnnnnnnnnnnnnnnnnnnnnnnnnnnnnnnnnnnnnnnnnnnnnnnnnnnnnnnnnnnnnnnnnnnnnnnnnnnnnnnnnnnnnnnnnnnnnnnnnnnnnnnnnnnnnnnnnnnnnnnnnnnnnnnnnnnnnnnnnnnnnnnnnnnnnnnnnnnnnnnnnnnnnnnnnnnnnnnnnnnnnnnnnnnnnnnnnnnnnnnnnnnnnnnnnnnnnnnnnnnnnnnnnnnnnnnnnnnnnnnnnnnnnnnnnnnnnnnnnnnnnnnnnnnnnnnnnnnnnnnnnnnnnnnnnnnnnnnnnnnnnnnnnnnnnnnnnnnnnnnnnnnnnnnnnnnnnnnnnnnnnnnnnnnnnnnnnnnnnnnnnnnnnnnnnnnnnnnnnnnnnnnnnnnnnnnnnnnnnnnnnnnnnnnnnnnnnnnnnnnnnnnnnnnnnnnnnnnnnnnnnnnnnnnnnnnnnnnnnnnnnnnnnnnnnnnnnnnnnnnnnnnnnnnnnnnnnnnnnnnnnnnnnnnnnnnnnnnnnnnnnnnnnnnnnnnnnnnnnnnnnnnnnnnnnnnnnnnnnnnnnnnnnnnnnnnnnnnnnnnnnnnnnnnnnnnnnnnnnnnnnnnnnnnnnnnnnnnnnnnnnnnnnnnnnnnnnnnnnnnnnnnnnnnnnnnnnnnnnnnnnnnnnnnnnnnnnnnnnnnnnnnnnnnnnnnnnnnnnnnnnnnnnnnnnnnnnnnnnnnnnnnnnnnnnnnnnnnnnnnnnnnnnnnnnnnnnnnnnnnnnnnnnnnnnnnnnnnnnnnnnnnnnnnnnnnnnnnnnnnnnnnnnnnnnnnnnnnnnnnnnnnnnnnnnnnnnnnnnnnnnnnnnnnnnnnnnnnnnnnnnnnnnnnnnnnnnnnnnnnnnnnnnnnnnnnnnnnnnnnnnnnnnnnnnnnnnnnnnnnnnnnnnnnnnnnnnnnnnnnnnnnnnnnnnnnnnnnnnnnnnnnnnnnnnnnnnnnnnnnnnnnnnnnnnnnnnnnnnnnnnnnnnnnnnnnnnnnnnnnnnnnnnnnnnnnnnnnnnnnnnnnnnnnnnnnnnnnnnnnnnnnnnnnnnnnnnnnnnnnnnnnnnnnnnnnnnnnnnnnnnnnnnnnnnnnnnnnnnnnnnnnnnnnnnnnnnnnnnnnnnnnnnnnnnnnnnnnnnnnnnnnnnnnnnnnnnnnnnnnnnnnnnnnnnnnnnnnnnnnnnnnnnnnnnnnnnnnnnnnnnnnnnnnnnnnnnnnnnnnnnnnnnnnnnnnnnnnnnnnnnnnnnnnnnnnnnnnnnnnnnnnnnnnnnnnnnnnnnnnnnnnnnnnnnnnnnnnnnnnnnnnnnnnnnnnnnnnnnnnnnnnnnnnnnnnnnnnnnnnnnnnnnnnnnnnnnnnnnnnnnnnnnnnnnnnnnnnnnnnnnnnnnnnnnnnnnnnnnnnnnnnnnnnnnnnnnnnnnnnnnnnnnnnnnnnnnnnnnnnnnnnnnnnnnnnnnnnnnnnnnnnnnnnnnnnnnnnnnnnnnnnnnnnnnnnnnnnnnnnnnnnnnnnnnnnnnnnnnnnnnnnnnnnnnnnnnnnnnnnnnnnnnnnnnnnnnnnnnnnnnnnnnnnnnnnnnnnnnnnnnnnnnnnnnnnnnnnnnnnnnnnnnnnnnnnnnnnnnnnnnnnnnnnnnnnnnnnnnnnnnnnnnnnnnnnnnnnnnnnnnnnnnnnnnnnnnnnnnnnnnnnnnnnnnnnnnnnnnnnnnnnnnnnnnnnnnnnnnnnnnnnnnnnnnnnnnnnnnnnnnnnnnnnnnnnnnnnnnnnnnnnnnnnnnnnnnnnnnnnnnnnnnnnnnnnnnnnnnnnnnnnnnnnnnnnnnnnnnnnnnnnnnnnnnnnnnnnnnnnnnnnnnnnnnnnnnnnnnnnnnnnnnnnnnnnnnnnnnnnnnnnnnnnnnnnnnnnnnnnnnnnnnnnnnnnnnnnnnnnnnnnnnnnnnnnnnnnnnnnnnnnnnnnnnnnnnnnnnnnnnnnnnnnnnnnnnnnnnnnnnnnnnnnnnnnnnnnnnnnnnnnnnnnnnnnnnnnnnnnnnnnnnnnnnnnnnnnnnnnnnnnnnnnnnnnnnnnnnnnnnnnnnnnnnnnnnnnnnnnnnnnnnnnnnnnnnnnnnnnnnnnnnnnnnnnnnnnnnnnnnnnnnnnnnnnnnnnnnnnnnnnnnnnnnnnnnnnnnnnnnnnnnnnnnnnnnnnnnnnnnnnnnnnnnnnnnnnnnnnnnnnnnnnnnnnnnnnnnnnnnnnnnnnnnnnnnnnnnnnnnnnnnnnnnnnnnnnnnnnnnnnnnnnnnnnnnnnnnnnnnnnnnnnnnnnnnnnnnnnnnnnnnnnnnnnnnnnnnnnnnnnnnnnnnnnnnnnnnnnnnnnnnnnnnnnnnnnnnnnnnnnnnnnnnnnnnnnnnnnnnnnnnnnnnnnnnnnnnnnnnnnnnnnnnnnnnnnnnnnnnnnnnnnnnnnnnnnnnnnnnnnnnnnnnnnnnnnnnnnnnnnnnnnnnnnnnnnnnnnnnnnnnnnnnnnnnnnnnnnnnnnnnnnnnnnnnnnnnnnnnnnnnnnnnnnnnnnnnnnnnnnnnnnnnnnnnnnnnnnnnnnnnnnnnnnnnnnnnnnnnnnnnnnnnnnnnnnnnnnnnnnnnnnnnnnnnnnnnnnnnnnnnnnnnnnnnnnnnnnnnnnnnnnnnnnnnnnnnnnnnnnnnnnnnnnnnnnnnnnnnnnnnnnnnnnnnnnnnnnnnnnnnnnnnnnnnnnnnnnnnnnnnnnnnnnnnnnnnnnnnnnnnnnnnnnnnnnnnnnnnnnnnnnnnnnnnnnnnnnnnnnnnnnnnnnnnnnnnnnnnnnnnnnnnnnnnnnnnnnnnnnnnnnnnnnnnnnnnnnnnnnnnnnnnnnnnnnnnnnnnnnnnnnnnnnnnnnnnnnnnnnnnnnnnnnnnnnnnnnnnnnnnnnnnnnnnnnnnnnnnnnnnnnnnnnnnnnnnnnnnnnnnnnnnnnnnnnnnnnnnnnnnnnnnnnnnnnnnnnnnnnnnnnnnnnnnnnnnnnnnnnnnnnnnnnnnnnnnnnnnnnnnnnnnnnnnnnnnnnnnnnnnnnnnnnnnnnnnnnnnnnnnnnnnnnnnnnnnnnnnnnnnnnnnnnnnnnnnnnnnnnnnnnnnnnnnnnnnnnnnnnnnnnnnnnnnnnnnnnnnnnnnnnnnnnnnnnnnnnnnnnnnnnnnnnnnnnnnnnnnnnnnnnnnnnnnnnnnnnnnnnnnnnnnnnnnnnnnnnnnnnnnnnnnnnnnnnnnnnnnnnnnnnnnnnnnnnnnnnnnnnnnnnnnnnnnnnnnnnnnnnnnnnnnnnnnnnnnnnnnnnnnnnnnnnnnnnnnnnnnnnnnnnnnnnnnnnnnnnnnnnnnnnnnnnnnnnnnnnnnnnnnnnnnnnnnnnnnnnnnnnnnnnnnnnnnnnnnnnnnnnnnnnnnnnnnnnnnnnnnnnnnnnnnnnnnnnnnnnnnnnnnnnnnnnnnnnnnnnnnnnnnnnnnnnnnnnnnnnnnnnnnnnnnnnnnnnnnnnnnnnnnnnnnnnnnnnnnnnnnnnnnnnnnnnnnnnnnnnnnnnnnnnnnnnnnnnnnnnnnnnnnnnnnnnnnnnnnnnnnnnnnnnnnnnnnnnnnnnnnnnnnnnnnnnnnnnnnnnnnnnnnnnnnnnnnnnnnnnnnnnnnnnnnnnnnnnnnnnnnnnnnnnnnnnnnnnnnnnnnnnnnnnnnnnnnnnnnnnnnnnnnnnnnnnnnnnnnnnnnnnnnnnnnnnnnnnnnnnnnnnnnnnnnnnnnnnnnnnnnnnnnnnnnnnnnnnnnnnnnnnnnnnnnnnnnnnnnnnnnnnnnnnnnnnnnnnnnnnnnnnnnnnnnnnnnnnnnnnnnnnnnnnnnnnnnnnnnnnnnnnnnnnnnnnnnnnnnnnnnnnnnnnnnnnnnnnnnnnnnnnnnnnnnnnnnnnnnnnnnnnnnnnnnnnnnnnnnnnnnnnnnnnnnnnnnnnnnnnnnnnnnnnnnnnnnnnnnnnnnnnnnnnnnnnnnnnnnnnnnnnnnnnnnnnnnnnnnnnnnnnnnnnnnnnnnnnnnnnnnnnnnnnnnnnnnnnnnnnnnnnnnnnnnnnnnnnnnnnnnnnnnnnnnnnnnnnnnnnnnnnnnnnnnnnnnnnnnnnnnnnnnnnnnnnnnnnnnnnnnnnnnnnnnnnnnnnnnnnnnnnnnnnnnnnnnnnnnnnnnnnnnnnnnnnnnnnnnnnnnnnnnnnnnnnnnnnnnnnnnnnnnnnnnnnnnnnnnnnnnnnnnnnnnnnnnnnnnnnnnnnnnnnnnnnnnnnnnnnnnnnnnnnnnnnnnnnnnnnnnnnnnnnnnnnnnnnnnnnnnnnnnnnnnnnnnnnnnnnnnnnnnnnnnnnnnnnnnnnnnnnnnnnnnnnnnnnnnnnnnnnnnnnnnnnnnnnnnnnnnnnnnnnnnnnnnnnnnnnnnnnnnnnnnnnnnnnnnnnnnnnnnnnnnnnnnnnnnnnnnnnnnnnnnnnnnnnnnnnnnnnnnnnnnnnnnnnnnnnnnnnnnnnnnnnnnnnnnnnnnnnnnnnnnnnnnnnnnnnnnnnnnnnnnnnnnnnnnnnnnnnnnnnnnnnnnnnnnnnnnnnnnnnnnnnnnnnnnnnnnnnnnnnnnnnnnnnnnnnnnnnnnnnnnnnnnnnnnnnnnnnnnnnnnnnnnnnnnnnnnnnnnnnnnnnnnnnnnnnnnnnnnnnnnnnnnnnnnnnnnnnnnnnnnnnnnnnnnnnnnnnnnnnnnnnnnnnnnnnnnnnnnnnnnnnnnnnnnnnnnnnnnnnnnnnnnnnnnnnnnnnnnnnnnnnnnnnnnnnnnnnnnnnnnnnnnnnnnnnnnnnnnnnnnnnnnnnnnnnnnnnnnnnnnnnnnnnnnnnnnnnnnnnnnnnnnnnnnnnnnnnnnnnnnnnnnnnnnnnnnnnnnnnnnnnnnnnnnnnnnnnnnnnnnnnnnnnnnnnnnnnnnnnnnnnnnnnnnnnnnnnnnnnnnnnnnnnnnnnnnnnnnnnnnnnnnnnnnnnnnnnnnnnnnnnnnnnnnnnnnnnnnnnnnnnnnnnnnnnnnnnnnnnnnnnnnnnnnnnnnnnnnnnnnnnnnnnnnnnnnnnnnnnnnnnnnnnnnnnnnnnnnnnnnnnnnnnnnnnnnnnnnnnnnnnnnnnnnnnnnnnnnnnnnnnnnnnnnnnnnnnnnnnnnnnnnnnnnnnnnnnnnnnnnnnnnnnnnnnnnnnnnnnnnnnnnnnnnnnnnnnnnnnnnnnnnnnnnnnnnnnnnnnnnnnnnnnnnnnnnnnnnnnnnnnnnnnnnnnnnnnnnnnnnnnnnnnnnnnnnnnnnnnnnnnnnnnnnnnnnnnnnnnnnnnnnnnnnnnnnnnnnnnnnnnnnnnnnnnnnnnnnnnnnnnnnnnnnnnnnnnnnnnnnnnnnnnnnnnnnnnnnnnnnnnnnnnnnnnnnnnnnnnnnnnnnnnnnnnnnnnnnnnnnnnnnnnnnnnnnnnnnnnnnnnnnnnnnnnnnnnnnnnnnnnnnnnnnnnnnnnnnnnnnnnnnnnnnnnnnnnnnnnnnnnnnnnnnnnnnnnnnnnnnnnnnnnnnnnnnnnnnnnnnnnnnnnnnnnnnnnnnnnnnnnnnnnnnnnnnnnnnnnnnnnnnnnnnnnnnnnnnnnnnnnnnnnnnnnnnnnnnnnnnnnnnnnnnnnnnnnnnnnnnnnnnnnnnnnnnnnnnnnnnnnnnnnnnnnnnnnnnnnnnnnnnnnnnnnnnnnnnnnnnnnnnnnnnnnnnnnnnnnnnnnnnnnnnnnnnnnnnnnnnnnnnnnnnnnnnnnnnnnnnnnnnnnnnnnnnnnnnnnnnnnnnnnnnnnnnnnnnnnnnnnnnnnnnnnnnnnnnnnnnnnnnnnnnnnnnnnnnnnnnnnnnnnnnnnnnnnnnnnnnnnnnnnnnnnnnnnnnnnnnnnnnnnnnnnnnnnnnnnnnnnnnnnnnnnnnnnnnnnnnnnnnnnnnnnnnnnnnnnnnnnnnnnnnnnnnnnnnnnnnnnnnnnnnnnnnnnnnnnnnnnnnnnnnnnnnnnnnnnnnnnnnnnnnnnnnnnnnnnnnnnnnnnnnnnnnnnnnnnnnnnnnnnnnnnnnnnnnnnnnnnnnnnnnnnnnnnnnnnnnnnnnnnnnnnnnnnnnnnnnnnnnnnnnnnnnnnnnnnnnnnnnnnnnnnnnnnnnnnnnnnnnnnnnnnnnnnnnnnnnnnnnnnnnnnnnnnnnnnnnnnnnnnnnnnnnnnnnnnnnnnnnnnnnnnnnnnnnnnnnnnnnnnnnnnnnnnnnnnnnnnnnnnnnnnnnnnnnnnnnnnnnnnnnnnnnnnnnnnnnnnnnnnnnnnnnnnnnnnnnnnnnnnnnnnnnnnnnnnnnnnnnnnnnnnnnnnnnnnnnnnnnnnnnnnnnnnnnnnnnnnnnnnnnnnnnnnnnnnnnnnnnnnnnnnnnnnnnnnnnnnnnnnnnnnnnnnnnnnnnnnnnnnnnnnnnnnnnnnnnnnnnnnnnnnnnnnnnnnnnnnnnnnnnnnnnnnnnnnnnnnnnnnnnnnnnnnnnnnnnnnnnnnnnnnnnnnnnnnnnnnnnnnnnnnnnnnnnnnnnnnnnnnnnnnnnnnnnnnnnnnnnnnnnnnnnnnnnnnnnnnnnnnnnnnnnnnnnnnnnnnnnnnnnnnnnnnnnnnnnnnnnnnnnnnnnnnnnnnnnnnnnnnnnnnnnnnnnnnnnnnnnnnnnnnnnnnnnnnnnnnnnnnnnnnnnnnnnnnnnnnnnnnnnnnnnnnnnnnnnnnnnnnnnnnnnnnnnnnnnnnnnnnnnnnnnnnnnnnnnnnnnnnnnnnnnnnnnnnnnnnnnnnnnnnnnnnnnnnnnnnnnnnnnnnnnnnnnnnnnnnnnnnnnnnnnnnnnnnnnnnnnnnnnnnnnnnnnnnnnnnnnnnnnnnnnnnnnnnnnnnnnnnnnnnnnnnnnnnnnnnnnnnnnnnnnnnnnnnnnnnnnnnnnnnnnnnnnnnnnnnnnnnnnnnnnnnnnnnnnnnnnnnnnnnnnnnnnnnnnnnnnnnnnnnnnnnnnnnnnnnnnnnnnnnnnnnnnnnnnnnnnnnnnnnnnnnnnnnnnnnnnnnnnnnnnnnnnnnnnnnnnnnnnnnnnnnnnnnnnnnnnnnnnnnnnnnnnnnnnnnnnnnnnnnnnnnnnnnnnnnnnnnnnnnnnnnnnnnnnnnnnnnnnnnnnnnnnnnnnnnnnnnnnnnnnnnnnnnnnnnnnnnnnnnnnnnnnnnnnnnnnnnnnnnnnnnnnnnnnnnnnnnnnnnnnnnnnnnnnnnnnnnnnnnnnnnnnnnnnnnnnnnnnnnnnnnnnnnnnnnnnnnnnnnnnnnnnnnnnnnnnnnnnnnnnnnnnnnnnnnnnnnnnnnnnnnnnnnnnnnnnnnnnnnnnnnnnnnnnnnnnnnnnnnnnnnnnnnnnnnnnnnnnnnnnnnnnnnnnnnnnnnnnnnnnnnnnnnnnnnnnnnnnnnnnnnnnnnnnnnnnnnnnnnnnnnnnnnnnnnnnnnnnnnnnnnnnnnnnnnnnnnnnnnnnnnnnnnnnnnnnnnnnnnnnnnnnnnnnnnnnnnnnnnnnnnnnnnnnnnnnnnnnnnnnnnnnnnnnnnnnnnnnnnnnnnnnnnnnnnnnnnnnnnnnnnnnnnnnnnnnnnnnnnnnnnnnnnnnnnnnnnnnnnnnnnnnnnnnnnnnnnnnnnnnnnnnnnnnnnnnnnnnnnnnnnnnnnnnnnnnnnnnnnnnnnnnnnnnnnnnnnnnnnnnnnnnnnnnnnnnnnnnnnnnnnnnnnnnnnnnnnnnnnnnnnnnnnnnnnnnnnnnnnnnnnnnnnnnnnnnnnnnnnnnnnnnnnnnnnnnnnnnnnnnnnnnnnnnnnnnnnnnnnnnnnnnnnnnnnnnnnnnnnnnnnnnnnnnnnnnnnnnnnnnnnnnnnnnnnnnnnnnnnnnnnnnnnnnnnnnnnnnnnnnnnnnnnnnnnnnnnnnnnnnnnnnnnnnnnnnnnnnnnnnnnnnnnnnnnnnnnnnnnnnnnnnnnnnnnnnnnnnnnnnnnnnnnnnnnnnnnnnnnnnnnnnnnnnnnnnnnnnnnnnnnnnnnnnnnnnnnnnnnnnnnnnnnnnnnnnnnnnnnnnnnnnnnnnnnnnnnnnnnnnnnnnnnnnnnnnnnnnnnnnnnnnnnnnnnnnnnnnnnnnnnnnnnnnnnnnnnnnnnnnnnnnnnnnnnnnnnnnnnnnnnnnnnnnnnnnnnnnnnnnnnnnnnnnnnnnnnnnnnnnnnnnnnnnnnnnnnnnnnnnnnnnnnnnnnnnnnnnnnnnnnnnnnnnnnnnnnnnnnnnnnnnnnnnnnnnnnnnnnnnnnnnnnnnnnnnnnnnnnnnnnnnnnnnnnnnnnnnnnnnnnnnnnnnnnnnnnnnnnnnnnnnnnnnnnnnnnnnnnnnnnnnnnnnnnnnnnnnnnnnnnnnnnnnnnnnnnnnnnnnnnnnnnnnnnnnnnnnnnnnnnnnnnnnnnnnnnnnnnnnnnnnnnnnnnnnnnnnnnnnnnnnnnnnnnnnnnnnnnnnnnnnnnnnnnnnnnnnnnnnnnnnnnnnnnnnnnnnnnnnnnnnnnnnnnnnnnnnnnnnnnnnnnnnnnnnnnnnnnnnnnnnnnnnnnnnnnnnnnnnnnnnnnnnnnnnnnnnnnnnnnnnnnnnnnnnnnnnnnnnnnnnnnnnnnnnnnnnnnnnnnnnnnnnnnnnnnnnnnnnnnnnnnnnnnnnnnnnnnnnnnnnnnnnnnnnnnnnnnnnnnnnnnnnnnnnnnnnnnnnnnnnnnnnnnnnnnnnnnnnnnnnnnnnnnnnnnnnnnnnnnnnnnnnnnnnnnnnnnnnnnnnnnnnnnnnnnnnnnnnnnnnnnnnnnnnnnnnnnnnnnnnnnnnnnnnnnnnnnnnnnnnnnnnnnnnnnnnnnnnnnnnnnnnnnnnnnnnnnnnnnnnnnnnnnnnnnnnnnnnnnnnnnnnnnnnnnnnnnnnnnnnnnnnnnnnnnnnnnnnnnnnnnnnnnnnnnnnnnnnnnnnnnnnnnnnnnnnnnnnnnnnnnnnnnnnnnnnnnnnnnnnnnnnnnnnnnnnnnnnnnnnnnnnnnnnnnnnnnnnnnnnnnnnnnnnnnnnnnnnnnnnnnnnnnnnnnnnnnnnnnnnnnnnnnnnnnnnnnnnnnnnnnnnnnnnnnnnnnnnnnnnnnnnnnnnnnnnnnnnnnnnnnnnnnnnnnnnnnnnnnnnnnnnnnnnnnnnnnnnnnnnnnnnnnnnnnnnnnnnnnnnnnnnnnnnnnnnnnnnnnnnnnnnnnnnnnnnnnnnnnnnnnnnnnnnnnnnnnnnnnnnnnnnnnnnnnnnnnnnnnnnnnnnnnnnnnnnnnnnnnnnnnnnnnnnnnnnnnnnnnnnnnnnnnnnnnnnnnnnnnnnnnnnnnnnnnnnnnnnnnnnnnnnnnnnnnnnnnnnnnnnnnnnnnnnnnnnnnnnnnnnnnnnnnnnnnnnnnnnnnnnnnnnnnnnnnnnnnnnnnnnnnnnnnnnnnnnnnnnnnnnnnnnnnnnnnnnnnnnnnnnnnnnnnnnnnnnnnnnnnnnnnnnnnnnnnnnnnnnnnnnnnnnnnnnnnnnnnnnnnnnnnnnnnnnnnnnnnnnnnnnnnnnnnnnnnnnnnnnnnnnnnnnnnnnnnnnnnnnnnnnnnnnnnnnnnnnnnnnnnnnnnnnnnnnnnnnnnnnnnnnnnnnnnnnnnnnnnnnnnnnnnnnnnnnnnnnnnnnnnnnnnnnnnnnnnnnnnnnnnnnnnnnnnnnnnnnnnnnnnnnnnnnnnnnnnnnnnnnnnnnnnnnnnnnnnnnnnnnnnnnnnnnnnnnnnnnnnnnnnnnnnnnnnnnnnnnnnnnnnnnnnnnnnnnnnnnnnnnnnnnnnnnnnnnnnnnnnnnnnnnnnnnnnnnnnnnnnnnnnnnnnnnnnnnnnnnnnnnnnnnnnnnnnnnnnnnnnnnnnnnnnnnnnnnnnnnnnnnnnnnnnnnnnnnnnnnnnnnnnnnnnnnnnnnnnnnnnnnnnnnnnnnnnnnnnnnnnnnnnnnnnnnnnnnnnnnnnnnnnnnnnnnnnnnnnnnnnnnnnnnnnnnnnnnnnnnnnnnnnnnnnnnnnnnnnnnnnnnnnnnnnnnnnnnnnnnnnnnnnnnnnnnnnnnnnnnnnnnnnnnnnnnnnnnnnnnnnnnnnnnnnnnnnnnnnnnnnnnnnnnnnnnnnnnnnnnnnnnnnnnnnnnnnnnnnnnnnnnnnnnnnnnnnnnnnnnnnnnnnnnnnnnnnnnnnnnnnnnnnnnnnnnnnnnnnnnnnnnnnnnnnnnnnnnnnnnnnnnnnnnnnnnnnnnnnnnnnnnnnnnnnnnnnnnnnnnnnnnnnnnnnnnnnnnnnnnnnnnnnnnnnnnnnnnnnnnnnnnnnnnnnnnnnnnnnnnnnnnnnnnnnnnnnnnnnnnnnnnnnnnnnnnnnnnnnnnnnnnnnnnnnnnnnnnnnnnnnnnnnnnnnnnnnnnnnnnnnnnnnnnnnnnnnnnnnnnnnnnnnnnnnnnnnnnnnnnnnnnnnnnnnnnnnnnnnnnnnnnnnnnnnnnnnnnnnnnnnnnnnnnnnnnnnnnnnnnnnnnnnnnnnnnnnnnnnnnnnnnnnnnnnnnnnnnnnnnnnnnnnnnnnnnnnnnnnnnnnnnnnnnnnnnnnnnnnnnnnnnnnnnnnnnnnnnnnnnnnnnnnnnnnnnnnnnnnnnnnnnnnnnnnnnnnnnnnnnnnnnnnnnnnnnnnnnnnnnnnnnnnnnnnnnnnnnnnnnnnnnnnnnnnnnnnnnnnnnnnnnnnnnnnnnnnnnnnnnnnnnnnnnnnnnnnnnnnnnnnnnnnnnnnnnnnnnnnnnnnnnnnnnnnnnnnnnnnnnnnnnnnnnnnnnnnnnnnnnnnnnnnnnnnnnnnnnnnnnnnnnnnnnnnnnnnnnnnnnnnnnnnnnnnnnnnnnnnnnnnnnnnnnnnnnnnnnnnnnnnnnnnnnnnnnnnnnnnnnnnnnnnnnnnnnnnnnnnnnnnnnnnnnnnnnnnnnnnnnnnnnnnnnnnnnnnnnnnnnnnnnnnnnnnnnnnnnnnnnnnnnnnnnnnnnnnnnnnnnnnnnnnnnnnnnnnnnnnnnnnnnnnnnnnnnnnnnnnnnnnnnnnnnnnnnnnnnnnnnnnnnnnnnnnnnnnnnnnnnnnnnnnnnnnnnnnnnnnnnnnnnnnnnnnnnnnnnnnnnnnnnnnnnnnnnnnnnnnnnnnnnnnnnnnnnnnnnnnnnnnnnnnnnnnnnnnnnnnnnnnnnnnnnnnnnnnnnnnnnnnnnnnnnnnnnnnnnnnnnnnnnnnnnnnnnnnnnnnnnnnnnnnnnnnnnnnnnnnnnnnnnnnnnnnnnnnnnnnnnnnnnnnnnnnnnnnnnnnnnnnnnnnnnnnnnnnnnnnnnnnnnnnnnnnnnnnnnnnnnnnnnnnnnnnnnnnnnnnnnnnnnnnnnnnnnnnnnnnnnnnnnnnnnnnnnnnnnnnnnnnnnnnnnnnnnnnnnnnnnnnnnnnnnnnnnnnnnnnnnnnnnnnnnnnnnnnnnnnnnnnnnnnnnnnnnnnnnnnnnnnnnnnnnnnnnnnnnnnnnnnnnnnnnnnnnnnnnnnnnnnnnnnnnnnnnnnnnnnnnnnnnnnnnnnnnnnnnnnnnnnnnnnnnnnnnnnnnnnnnnnnnnnnnnnnnnnnnnnnnnnnnnnnnnnnnnnnnnnnnnnnnnnnnnnnnnnnnnnnnnnnnnnnnnnnnnnnnnnnnnnnnnnnnnnnnnnnnnnnnnnnnnnnnnnnnnnnnnnnnnnnnnnnnnnnnnnnnnnnnnnnnnnnnnnnnnnnnnnnnnnnnnnnnnnnnnnnnnnnnnnnnnnnnnnnnnnnnnnnnnnnnnnnnnnnnnnnnnnnnnnnnnnnnnnnnnnnnnnnnnnnnnnnnnnnnnnnnnnnnnnnnnnnnnnnnnnnnnnnnnnnnnnnnnnnnnnnnnnnnnnnnnnnnnnnnnnnnnnnnnnnnnnnnnnnnnnnnnnnnnnnnnnnnnnnnnnnnnnnnnnnnnnnnnnnnnnnnnnnnnnnnnnnnnnnnnnnnnnnnnnnnnnnnnnnnnnnnnnnnnnnnnnnnnnnnnnnnnnnnnnnnnnnnnnnnnnnnnnnnnnnnnnnnnnnnnnnnnnnnnnnnnnnnnnnnnnnnnnnnnnnnnnnnnnnnnnnnnnnnnnnnnnnnnnnnnnnnnnnnnnnnnnnnnnnnnnnnnnnnnnnnnnnnnnnnnnnnnnnnnnnnnnnnnnnnnnnnnnnnnnnnnnnnnnnnnnnnnnnnnnnnnnnnnnnnnnnnnnnnnnnnnnnnnnnnnnnnnnnnnnnnnnnnnnnnnnnnnnnnnnnnnnnnnnnnnnnnnnnnnnnnnnnnnnnnnnnnnnnnnnnnnnnnnnnnnnnnnnnnnnnnnnnnnnnnnnnnnnnnnnnnnnnnnnnnnnnnnnnnnnnnnnnnnnnnnnnnnnnnnnnnnnnnnnnnnnnnnnnnnnnnnnnnnnnnnnnnnnnnnnnnnnnnnnnnnnnnnnnnnnnnnnnnnnnnnnnnnnnnnnnnnnnnnnnnnnnnnnnnnnnnnnnnnnnnnnnnnnnnnnnnnnnnnnnnnnnnnnnnnnnnnnnnnnnnnnnnnnnnnnnnnnnnnnnnnnnnnnnnnnnnnnnnnnnnnnnnnnnnnnnnnnnnnnnnnnnnnnnnnnnnnnnnnnnnnnnnnnnnnnnnnnnnnnnnnnnnnnnnnnnnnnnnnnnnnnnnnnnnnnnnnnnnnnnnnnnnnnnnnnnnnnnnnnnnnnnnnnnnnnnnnnnnnnnnnnnnnnnnnnnnnnnnnnnnnnnnnnnnnnnnnnnnnnnnnnnnnnnnnnnnnnnnnnnnnnnnnnnnnnnnnnnnnnnnnnnnnnnnnnnnnnnnnnnnnnnnnnnnnnnnnnnnnnnnnnnnnnnnnnnnnnnnnnnnnnnnnnnnnnnnnnnnnnnnnnnnnnnnnnnnnnnnnnnnnnnnnnnnnnnnnnnnnnnnnnnnnnnnnnnnnnnnnnnnnnnnnnnnnnnnnnnnnnnnnnnnnnnnnnnnnnnnnnnnnnnnnnnnnnnnnnnnnnnnnnnnnnnnnnnnnnnnnnnnnnnnnnnnnnnnnnnnnnnnnnnnnnnnnnnnnnnnnnnnnnnnnnnnnnnnnnnnnnnnnnnnnnnnnnnnnnnnnnnnnnnnnnnnnnnnnnnnnnnnnnnnnnnnnnnnnnnnnnnnnnnnnnnnnnnnnnnnnnnnnnnnnnnnnnnnnnnnnnnnnnnnnnnnnnnnnnnnnnnnnnnnnnnnnnnnnnnnnnnnnnnnnnnnnnnnnnnnnnnnnnnnnnnnnnnnnnnnnnnnnnnnnnnnnnnnnnnnnnnnnnnnnnnnnnnnnnnnnnnnnnnnnnnnnnnnnnnnnnnnnnnnnnnnnnnnnnnnnnnnnnnnnnnnnnnnnnnnnnnnnnnnnnnnnnnnnnnnnnnnnnnnnnnnnnnnnnnnnnnnnnnnnnnnnnnnnnnnnnnnnnnnnnnnnnnnnnnnnnnnnnnnnnnnnnnnnnnnnnnnnnnnnnnnnnnnnnnnnnnnnnnnnnnnnnnnnnnnnnnnnnnnnnnnnnnnnnnnnnnnnnnnnnnnnnnnnnnnnnnnnnnnnnnnnnnnnnnnnnnnnnnnnnnnnnnnnnnnnnnnnnnnnnnnnnnnnnnnnnnnnnnnnnnnnnnnnnnnnnnnnnnnnnnnnnnnnnnnnnnnnnnnnnnnnnnnnnnnnnnnnnnnnnnnnnnnnnnnnnnnnnnnnnnnnnnnnnnnnnnnnnnnnnnnnnnnnnnnnnnnnnnnnnnnnnnnnnnnnnnnnnnnnnnnnnnnnnnnnnnnnnnnnnnnnnnnnnnnnnnnnnnnnnnnnnnnnnnnnnnnnnnnnnnnnnnnnnnnnnnnnnnnnnnnnnnnnnnnnnnnnnnnnnnnnnnnnnnnnnnnnnnnnnnnnnnnnnnnnnnnnnnnnnnnnnnnnnnnnnnnnnnnnnnnnnnnnnnnnnnnnnnnnnnnnnnnnnnnnnnnnnnnnnnnnnnnnnnnnnnnnnnnnnnnnnnnnnnnnnnnnnnnnnnnnnnnnnnnnnnnnnnnnnnnnnnnnnnnnnnnnnnnnnnnnnnnnnnnnnnnnnnnnnnnnnnnnnnnnnnnnnnnnnnnnnnnnnnnnnnnnnnnnnnnnnnnnnnnnnnnnnnnnnnnnnnnnnnnnnnnnnnnnnnnnnnnnnnnnnnnnnnnnnnnnnnnnnnnnnnnnnnnnnnnnnnnnnnnnnnnnnnnnnnnnnnnnnnnnnnnnnnnnnnnnnnnnnnnnnnnnnnnnnnnnnnnnnnnnnnnnnnnnnnnnnnnnnnnnnnnnnnnnnnnnnnnnnnnnnnnnnnnnnnnnnnnnnnnnnnnnnnnnnnnnnnnnnnnnnnnnnnnnnnnnnnnnnnnnnnnnnnnnnnnnnnnnnnnnnnnnnnnnnnnnnnnnnnnnnnnnnnnnnnnnnnnnnnnnnnnnnnnnnnnnnnnnnnnnnnnnnnnnnnnnnnnnnnnnnnnnnnnnnnnnnnnnnnnnnnnnnnnnnnnnnnnnnnnnnnnnnnnnnnnnnnnnnnnnnnnnnnnnnnnnnnnnnnnnnnnnnnnnnnnnnnnnnnnnnnnnnnnnnnnnnnnnnnnnnnnnnnnnnnnnnnnnnnnnnnnnnnnnnnnnnnnnnnnnnnnnnnnnnnnnnnnnnnnnnnnnnnnnnnnnnnnnnnnnnnnnnnnnnnnnnnnnnnnnnnnnnnnnnnnnnnnnnnnnnnnnnnnnnnnnnnnnnnnnnnnnnnnnnnnnnnnnnnnnnnnnnnnnnnnnnnnnnnnnnnnnnnnnnnnnnnnnnnnnnnnnnnnnnnnnnnnnnnnnnnnnnnnnnnnnnnnnnnnnnnnnnnnnnnnnnnnnnnnnnnnnnnnnnnnnnnnnnnnnnnnnnnnnnnnnnnnnnnnnnnnnnnnnnnnnnnnnnnnnnnnnnnnnnnnnnnnnnnnnnnnnnnnnnnnnnnnnnnnnnnnnnnnnnnnnnnnnnnnnnnnnnnnnnnnnnnnnnnnnnnnnnnnnnnnnnnnnnnnnnnnnnnnnnnnnnnnnnnnnnnnnnnnnnnnnnnnnnnnnnnnnnnnnnnnnnnnnnnnnnnnnnnnnnnnnnnnnnnnnnnnnnnnnnnnnnnnnnnnnnnnnnnnnnnnnnnnnnnnnnnnnnnnnnnnnnnnnnnnnnnnnnnnnnnnnnnnnnnnnnnnnnnnnnnnnnnnnnnnnnnnnnnnnnnnnnnnnnnnnnnnnnnnnnnnnnnnnnnnnnnnnnnnnnnnnnnnnnnnnnnnnnnnnnnnnnnnnnnnnnnnnnnnnnnnnnnnnnnnnnnnnnnnnnnnnnnnnnnnnnnnnnnnnnnnnnnnnnnnnnnnnnnnnnnnnnnnnnnnnnnnnnnnnnnnnnnnnnnnnnnnnnnnnnnnnnnnnnnnnnnnnnnnnnnnnnnnnnnnnnnnnnnnnnnnnnnnnnnnnnnnnnnnnnnnnnnnnnnnnnnnnnnnnnnnnnnnnnnnnnnnnnnnnnnnnnnnnnnnnnnnnnnnnnnnnnnnnnnnnnnnnnnnnnnnnnnnnnnnnnnnnnnnnnnnnnnnnnnnnnnnnnnnnnnnnnnnnnnnnnnnnnnnnnnnnnnnnnnnnnnnnnnnnnnnnnnnnnnnnnnnnnnnnnnnnnnnnnnnnnnnnnnnnnnnnnnnnnnnnnnnnnnnnnnnnnnnnnnnnnnnnnnnnnnnnnnnnnnnnnnnnnnnnnnnnnnnnnnnnnnnnnnnnnnnnnnnnnnnnnnnnnnnnnnnnnnnnnnnnnnnnnnnnnnnnnnnnnnnnnnnnnnnnnnnnnnnnnnnnnnnnnnnnnnnnnnnnnnnnnnnnnnnnnnnnnnnnnnnnnnnnnnnnnnnnnnnnnnnnnnnnnnnnnnnnnnnnnnnnnnnnnnnnnnnnnnnnnnnnnnnnnnnnnnnnnnnnnnnnnnnnnnnnnnnnnnnnnnnnnnnnnnnnnnnnnnnnnnnnnnnnnnnnnnnnnnnnnnnnnnnnnnnnnnnnnnnnnnnnnnnnnnnnnnnnnnnnnnnnnnnnnnnnnnnnnnnnnnnnnnnnnnnnnnnnnnnnnnnnnnnnnnnnnnnnnnnnnnnnnnnnnnnnnnnnnnnnnnnnnnnnnnnnnnnnnnnnnnnnnnnnnnnnnnnnnnnnnnnnnnnnnnnnnnnnnnnnnnnnnnnnnnnnnnnnnnnnnnnnnnnnnnnnnnnnnnnnnnnnnnnnnnnnnnnnnnnnnnnnnnnnnnnnnnnnnnnnnnnnnnnnnnnnnnnnnnnnnnnnnnnnnnnnnnnnnnnnnnnnnnnnnnnnnnnnnnnnnnnnnnnnnnnnnnnnnnnnnnnnnnnnnnnnnnnnnnnnnnnnnnnnnnnnnnnnnnnnnnnnnnnnnnnnnnnnnnnnnnnnnnnnnnnnnnnnnnnnnnnnnnnnnnnnnnnnnnnnnnnnnnnnnnnnnnnnnnnnnnnnnnnnnnnnnnnnnnnnnnnnnnnnnnnnnnnnnnnnnnnnnnnnnnnnnnnnnnnnnnnnnnnnnnnnnnnnnnnnnnnnnnnnnnnnnnnnnnnnnnnnnnnnnnnnnnnnnnnnnnnnnnnnnnnnnnnnnnnnnnnnnnnnnnnnnnnnnnnnnnnnnnnnnnnnnnnnnnnnnnnnnnnnnnnnnnnnnnnnnnnnnnnnnnnnnnnnnnnnnnnnnnnnnnnnnnnnnnnnnnnnnnnnnnnnnnnnnnnnnnnnnnnnnnnnnnnnnnnnnnnnnnnnnnnnnnnnnnnnnnnnnnnnnnnnnnnnnnnnnnnnnnnnnnnnnnnnnnnnnnnnnnnnnnnnnnnnnnnnnnnnnnnnnnnnnnnnnnnnnnnnnnnnnnnnnnnnnnnnnnnnnnnnnnnnnnnnnnnnnnnnnnnnnnnnnnnnnnnnnnnnnnnnnnnnnnnnnnnnnnnnnnnnnnnnnnnnnnnnnnnnnnnnnnnnnnnnnnnnnnnnnnnnnnnnnnnnnnnnnnnnnnnnnnnnnnnnnnnnnnnnnnnnnnnnnnnnnnnnnnnnnnnnnnnnnnnnnnnnnnnnnnnnnnnnnnnnnnnnnnnnnnnnnnnnnnnnnnnnnnnnnnnnnnnnnnnnnnnnnnnnnnnnnnnnnnnnnnnnnnnnnnnnnnnnnnnnnnnnnnnnnnnnnnnnnnnnnnnnnnnnnnnnnnnnnnnnnnnnnnnnnnnnnnnnnnnnnnnnnnnnnnnnnnnnnnnnnnnnnnnnnnnnnnnnnnnnnnnnnnnnnnnnnnnnnnnnnnnnnnnnnnnnnnnnnnnnnnnnnnnnnnnnnnnnnnnnnnnnnnnnnnnnnnnnnnnnnnnnnnnnnnnnnnnnnnnnnnnnnnnnnnnnnnnnnnnnnnnnnnnnnnnnnnnnnnnnnnnnnnnnnnnnnnnnnnnnnnnnnnnnnnnnnnnnnnnnnnnnnnnnnnnnnnnnnnnnnnnnnnnnnnnnnnnnnnnnnnnnnnnnnnnnnnnnnnnnnnnnnnnnnnnnnnnnnnnnnnnnnnnnnnnnnnnnnnnnnnnnnnnnnnnnnnnnnnnnnnnnnnnnnnnnnnnnnnnnnnnnnnnnnnnnnnnnnnnnnnnnnnnnnnnnnnnnnnnnnnnnnnnnnnnnnnnnnnnnnnnnnnnnnnnnnnnnnnnnnnnnnnnnnnnnnnnnnnnnnnnnnnnnnnnnnnnnnnnnnnnnnnnnnnnnnnnnnnnnnnnnnnnnnnnnnnnnnnnnnnnnnnnnnnnnnnnnnnnnnnnnnnnnnnnnnnnnnnnnnnnnnnnnnnnnnnnnnnnnnnnnnnnnnnnnnnnnnnnnnnnnnnnnnnnnnnnnnnnnnnnnnnnnnnnnnnnnnnnnnnnnnnnnnnnnnnnnnnnnnnnnnnnnnnnnnnnnnnnnnnnnnnnnnnnnnnnnnnnnnnnnnnnnnnnnnnnnnnnnnnnnnnnnnnnnnnnnnnnnnnnnnnnnnnnnnnnnnnnnnnnnnnnnnnnnnnnnnnnnnnnnnnnnnnnnnnnnnnnnnnnnnnnnnnnnnnnnnnnnnnnnnnnnnnnnnnnnnnnnnnnnnnnnnnnnnnnnnnnnnnnnnnnnnnnnnnnnnnnnnnnnnnnnnnnnnnnnnnnnnnnnnnnnnnnnnnnnnnnnnnnnnnnnnnnnnnnnnnnnnnnnnnnnnnnnnnnnnnnnnnnnnnnnnnnnnnnnnnnnnnnnnnnnnnnnnnnnnnnnnnnnnnnnnnnnnnnnnnnnnnnnnnnnnnnnnnnnnnnnnnnnnnnnnnnnnnnnnnnnnnnnnnnnnnnnnnnnnnnnnnnnnnnnnnnnnnnnnnnnnnnnnnnnnnnnnnnnnnnnnnnnnnnnnnnnnnnnnnnnnnnnnnnnnnnnnnnnnnnnnnnnnnnnnnnnnnnnnnnnnnnnnnnnnnnnnnnnnnnnnnnnnnnnnnnnnnnnnnnnnnnnnnnnnnnnnnnnnnnnnnnnnnnnnnnnnnnnnnnnnnnnnnnnnnnnnnnnnnnnnnnnnnnnnnnnnnnnnnnnnnnnnnnnnnnnnnnnnnnnnnnnnnnnnnnnnnnnnnnnnnnnnnnnnnnnnnnnnnnnnnnnnnnnnnnnnnnnnnnnnnnnnnnnnnnnnnnnnnnnnnnnnnnnnnnnnnnnnnnnnnnnnnnnnnnnnnnnnnnnnnnnnnnnnnnnnnnnnnnnnnnnnnnnnnnnnnnnnnnnnnnnnnnnnnnnnnnnnnnnnnnnnnnnnnnnnnnnnnnnnnnnnnnnnnnnnnnnnnnnnnnnnnnnnnnnnnnnnnnnnnnnnnnnnnnnnnnnnnnnnnnnnnnnnnnnnnnnnnnnnnnnnnnnnnnnnnnnnnnnnnnnnnnnnnnnnnnnnnnnnnnnnnnnnnnnnnnnnnnnnnnnnnnnnnnnnnnnnnnnnnnnnnnnnnnnnnnnnnnnnnnnnnnnnnnnnnnnnnnnnnnnnnnnnnnnnnnnnnnnnnnnnnnnnnnnnnnnnnnnnnnnnnnnnnnnnnnnnnnnnnnnnnnnnnnnnnnnnnnnnnnnnnnnnnnnnnnnnnnnnnnnnnnnnnnnnnnnnnnnnnnnnnnnnnnnnnnnnnnnnnnnnnnnnnnnnnnnnnnnnnnnnnnnnnnnnnnnnnnnnnnnnnnnnnnnnnnnnnnnnnnnnnnnnnnnnnnnnnnnnnnnnnnnnnnnnnnnnnnnnnnnnnnnnnnnnnnnnnnnnnnnnnnnnnnnnnnnnnnnnnnnnnnnnnnnnnnnnnnnnnnnnnnnnnnnnnnnnnnnnnnnnnnnnnnnnnnnnnnnnnnnnnnnnnnnnnnnnnnnnnnnnnnnnnnnnnnnnnnnnnnnnnnnnnnnnnnnnnnnnnnnnnnnnnnnnnnnnnnnnnnnnnnnnnnnnnnnnnnnnnnnnnnnnnnnnnnnnnnnnnnnnnnnnnnnnnnnnnnnnnnnnnnnnnnnnnnnnnnnnnnnnnnnnnnnnnnnnnnnnnnnnnnnnnnnnnnnnnnnnnnnnnnnnnnnnnnnnnnnnnnnnnnnnnnnnnnnnnnnnnnnnnnnnnnnnnnnnnnnnnnnnnnnnnnnnnnnnnnnnnnnnnnnnnnnnnnnnnnnnnnnnnnnnnnnnnnnnnnnnnnnnnnnnnnnnnnnnnnnnnnnnnnnnnnnnnnnnnnnnnnnnnnnnnnnnnnnnnnnnnnnnnnnnnnnnnnnnnnnnnnnnnnnnnnnnnnnnnnnnnnnnnnnnnnnnnnnnnnnnnnnnnnnnnnnnnnnnnnnnnnnnnnnnnnnnnnnnnnnnnnnnnnnnnnnnnnnnnnnnnnnnnnnnnnnnnnnnnnnnnnnnnnnnnnnnnnnnnnnnnnnnnnnnnnnnnnnnnnnnnnnnnnnnnnnnnnnnnnnnnnnnnnnnnnnnnnnnnnnnnnnnnnnnnnnnnnnnnnnnnnnnnnnnnnnnnnnnnnnnnnnnnnnnnnnnnnnnnnnnnnnnnnnnnnnnnnnnnnnnnnnnnnnnnnnnnnnnnnnnnnnnnnnnnnnnnnnnnnnnnnnnnnnnnnnnnnnnnnnnnnnnnnnnnnnnnnnnnnnnnnnnnnnnnnnnnnnnnnnnnnnnnnnnnnnnnnnnnnnnnnnnnnnnnnnnnnnnnnnnnnnnnnnnnnnnnnnnnnnnnnnnnnnnnnnnnnnnnnnnnnnnnnnnnnnnnnnnnnnnnnnnnnnnnnnnnnnnnnnnnnnnnnnnnnnnnnnnnnnnnnnnnnnnnnnnnnnnnnnnnnnnnnnnnnnnnnnnnnnnnnnnnnnnnnnnnnnnnnnnnnnnnnnnnnnnnnnnnnnnnnnnnnnnnnnnnnnnnnnnnnnnnnnnnnnnnnnnnnnnnnnnnnnnnnnnnnnnnnnnnnnnnnnnnnnnnnnnnnnnnnnnnnnnnnnnnnnnnnnnnnnnnnnnnnnnnnnnnnnnnnnnnnnnnnnnnnnnnnnnnnnnnnnnnnnnnnnnnnnnnnnnnnnnnnnnnnnnnnnnnnnnnnnnnnnnnnnnnnnnnnnnnnnnnnnnnnnnnnnnnnnnnnnnnnnnnnnnnnnnnnnnnnnnnnnnnnnnnnnnnnnnnnnnnnnnnnnnnnnnnnnnnnnnnnnnnnnnnnnnnnnnnnnnnnnnnnnnnnnnnnnnnnnnnnnnnnnnnnnnnnnnnnnnnnnnnnnnnnnnnnnnnnnnnnnnnnnnnnnnnnnnnnnnnnnnnnnnnnnnnnnnnnnnnnnnnnnnnnnnnnnnnnnnnnnnnnnnnnnnnnnnnnnnnnnnnnnnnnnnnnnnnnnnnnnnnnnnnnnnnnnnnnnnnnnnnnnnnnnnnnnnnnnnnnnnnnnnnnnnnnnnnnnnnnnnnnnnnnnnnnnnnnnnnnnnnnnnnnnnnnnnnnnnnnnnnnnnnnnnnnnnnnnnnnnnnnnnnnnnnnnnnnnnnnnnnnnnnnnnnnnnnnnnnnnnnnnnnnnnnnnnnnnnnnnnnnnnnnnnnnnnnnnnnnnnnnnnnnnnnnnnnnnnnnnnnnnnnnnnnnnnnnnnnnnnnnnnnnnnnnnnnnnnnnnnnnnnnnnnnnnnnnnnnnnnnnnnnnnnnnnnnnnnnnnnnnnnnnnnnnnnnnnnnnnnnnnnnnnnnnnnnnnnnnnnnnnnnnnnnnnnnnnnnnnnnnnnnnnnnnnnnnnnnnnnnnnnnnnnnnnnnnnnnnnnnnnnnnnnnnnnnnnnnnnnnnnnnnnnnnnnnnnnnnnnnnnnnnnnnnnnnnnnnnnnnnnnnnnnnnnnnnnnnnnnnnnnnnnnnnnnnnnnnnnnnnnnnnnnnnnnnnnnnnnnnnnnnnnnnnnnnnnnnnnnnnnnnnnnnnnnnnnnnnnnnnnnnnnnnnnnnnnnnnnnnnnnnnnnnnnnnnnnnnnnnnnnnnnnnnnnnnnnnnnnnnnnnnnnnnnnnnnnnnnnnnnnnnnnnnnnnnnnnnnnnnnnnnnnnnnnnnnnnnnnnnnnnnnnnnnnnnnnnnnnnnnnnnnnnnnnnnnnnnnnnnnnnnnnnnnnnnnnnnnnnnnnnnnnnnnnnnnnnnnnnnnnnnnnnnnnnnnnnnnnnnnnnnnnnnnnnnnnnnnnnnnnnnnnnnnnnnnnnnnnnnnnnnnnnnnnnnnnnnnnnnnnnnnnnnnnnnnnnnnnnnnnnnnnnnnnnnnnnnnnnnnnnnnnnnnnnnnnnnnnnnnnnnnnnnnnnnnnnnnnnnnnnnnnnnnnnnnnnnnnnnnnnnnnnnnnnnnnnnnnnnnnnnnnnnnnnnnnnnnnnnnnnnnnnnnnnnnnnnnnnnnnnnnnnnnnnnnnnnnnnnnnnnnnnnnnnnnnnnnnnnnnnnnnnnnnnnnnnnnnnnnnnnnnnnnnnnnnnnnnnnnnnnnnnnnnnnnnnnnnnnnnnnnnnnnnnnnnnnnnnnnnnnnnnnnnnnnnnnnnnnnnnnnnnnnnnnnnnnnnnnnnnnnnnnnnnnnnnnnnnnnnnnnnnnnnnnnnnnnnnnnnnnnnnnnnnnnnnnnnnnnnnnnnnnnnnnnnnnnnnnnnnnnnnnnnnnnnnnnnnnnnnnnnnnnnnnnnnnnnnnnnnnnnnnnnnnnnnnnnnnnnnnnnnnnnnnnnnnnnnnnnnnnnnnnnnnnnnnnnnnnnnnnnnnnnnnnnnnnnnnnnnnnnnnnnnnnnnnnnnnnnnnnnnnnnnnnnnnnnnnnnnnnnnnnnnnnnnnnnnnnnnnnnnnnnnnnnnnnnnnnnnnnnnnnnnnnnnnnnnnnnnnnnnnnnnnnnnnnnnnnnnnnnnnnnnnnnnnnnnnnnnnnnnnnnnnnnnnnnnnnnnnnnnnnnnnnnnnnnnnnnnnnnnnnnnnnnnnnnnnnnnnnnnnnnnnnnnnnnnnnnnnnnnnnnnnnnnnnnnnnnnnnnnnnnnnnnnnnnnnnnnnnnnnnnnnnnnnnnnnnnnnnnnnnnnnnnnnnnnnnnnnnnnnnnnnnnnnnnnnnnnnnnnnnnnnnnnnnnnnnnnnnnnnnnnnnnnnnnnnnnnnnnnnnnnnnnnnnnnnnnnnnnnnnnnnnnnnnnnnnnnnnnnnnnnnnnnnnnnnnnnnnnnnnnnnnnnnnnnnnnnnnnnnnnnnnnnnnnnnnnnnnnnnnnnnnnnnnnnnnnnnnnnnnnnnnnnnnnnnnnnnnnnnnnnnnnnnnnnnnnnnnnnnnnnnnnnnnnnnnnnnnnnnnnnnnnnnnnnnnnnnnnnnnnnnnnnnnnnnnnnnnnnnnnnnnnnnnnnnnnnnnnnnnnnnnnnnnnnnnnnnnnnnnnnnnnnnnnnnnnnnnnnnnnnnnnnnnnnnnnnnnnnnnnnnnnnnnnnnnnnnnnnnnnnnnnnnnnnnnnnnnnnnnnnnnnnnnnnnnnnnnnnnnnnnnnnnnnnnnnnnnnnnnnnnnnnnnnnnnnnnnnnnnnnnnnnnnnnnnnnnnnnnnnnnnnnnnnnnnnnnnnnnnnnnnnnnnnnnnnnnnnnnnnnnnnnnnnnnnnnnnnnnnnnnnnnnnnnnnnnnnnnnnnnnnnnnnnnnnnnnnnnnnnnnnnnnnnnnnnnnnnnnnnnnnnnnnnnnnnnnnnnnnnnnnnnnnnnnnnnnnnnnnnnnnnnnnnnnnnnnnnnnnnnnnnnnnnnnnnnnnnnnnnnnnnnnnnnnnnnnnnnnnnnnnnnnnnnnnnnnnnnnnnnnnnnnnnnnnnnnnnnnnnnnnnnnnnnnnnnnnnnnnnnnnnnnnnnnnnnnnnnnnnnnnnnnnnnnnnnnnnnnnnnnnnnnnnnnnnnnnnnnnnnnnnnnnnnnnnnnnnnnnnnnnnnnnnnnnnnnnnnnnnnnnnnnnnnnnnnnnnnnnnnnnnnnnnnnnnnnnnnnnnnnnnnnnnnnnnnnnnnnnnnnnnnnnnnnnnnnnnnnnnnnnnnnnnnnnnnnnnnnnnnnnnnnnnnnnnnnnnnnnnnnnnnnnnnnnnnnnnnnnnnnnnnnnnnnnnnnnnnnnnnnnnnnnnnnnnnnnnnnnnnnnnnnnnnnnnnnnnnnnnnnnnnnnnnnnnnnnnnnnnnnnnnnnnnnnnnnnnnnnnnnnnnnnnnnnnnnnnnnnnnnnnnnnnnnnnnnnnnnnnnnnnnnnnnnnnnnnnnnnnnnnnnnnnnnnnnnnnnnnnnnnnnnnnnnnnnnnnnnnnnnnnnnnnnnnnnnnnnnnnnnnnnnnnnnnnnnnnnnnnnnnnnnnnnnnnnnnnnnnnnnnnnnnnnnnnnnnnnnnnnnnnnnnnnnnnnnnnnnnnnnnnnnnnnnnnnnnnnnnnnnnnnnnnnnnnnnnnnnnnnnnnnnnnnnnnnnnnnnnnnnnnnnnnnnnnnnnnnnnnnnnnnnnnnnnnnnnnnnnnnnnnnnnnnnnnnnnnnnnnnnnnnnnnnnnnnnnnnnnnnnnnnnnnnnnnnnnnnnnnnnnnnnnnnnnnnnnnnnnnnnnnnnnnnnnnnnnnnnnnnnnnnnnnnnnnnnnnnnnnnnnnnnnnnnnnnnnnnnnnnnnnnnnnnnnnnnnnnnnnnnnnnnnnnnnnnnnnnnnnnnnnnnnnnnnnnnnnnnnnnnnnnnnnnnnnnnnnnnnnnnnnnnnnnnnnnnnnnnnnnnnnnnnnnnnnnnnnnnnnnnnnnnnnnnnnnnnnnnnnnnnnnnnnnnnnnnnnnnnnnnnnnnnnnnnnnnnnnnnnnnnnnnnnnnnnnnnnnnnnnnnnnnnnnnnnnnnnnnnnnnnnnnnnnnnnnnnnnnnnnnnnnnnnnnnnnnnnnnnnnnnnnnnnnnnnnnnnnnnnnnnnnnnnnnnnnnnnnnnnnnnnnnnnnnnnnnnnnnnnnnnnnnnnnnnnnnnnnnnnnnnnnnnnnnnnnnnnnnnnnnnnnnnnnnnnnnnnnnnnnnnnnnnnnnnnnnnnnnnnnnnnnnnnnnnnnnnnnnnnnnnnnnnnnnnnnnnnnnnnnnnnnnnnnnnnnnnnnnnnnnnnnnnnnnnnnnnnnnnnnnnnnnnnnnnnnnnnnnnnnnnnnnnnnnnnnnnnnnnnnnnnnnnnnnnnnnnnnnnnnnnnnnnnnnnnnnnnnnnnnnnnnnnnnnnnnnnnnnnnnnnnnnnnnnnnnnnnnnnnnnnnnnnnnnnnnnnnnnnnnnnnnnnnnnnnnnnnnnnnnnnnnnnnnnnnnnnnnnnnnnnnnnnnnnnnnnnnnnnnnnnnnnnnnnnnnnnnnnnnnnnnnnnnnnnnnnnnnnnnnnnnnnnnnnnnnnnnnnnnnnnnnnnnnnnnnnnnnnnnnnnnnnnnnnnnnnnnnnnnnnnnnnnnnnnnnnnnnnnnnnnnnnnnnnnnnnnnnnnnnnnnnnnnnnnnnnnnnnnnnnnnnnnnnnnnnnnnnnnnnnnnnnnnnnnnnnnnnnnnnnnnnnnnnnnnnnnnnnnnnnnnnnnnnnnnnnnnnnnnnnnnnnnnnnnnnnnnnnnnnnnnnnnnnnnnnnnnnnnnnnnnnnnnnnnnnnnnnnnnnnnnnnnnnnnnnnnnnnnnnnnnnnnnnnnnnnnnnnnnnnnnnnnnnnnnnnnnnnnnnnnnnnnnnnnnnnnnnnnnnnnnnnnnnnnnnnnnnnnnnnnnnnnnnnnnnnnnnnnnnnnnnnnnnnnnnnnnnnnnnnnnnnnnnnnnnnnnnnnnnnnnnnnnnnnnnnnnnnnnnnnnnnnnnnnnnnnnnnnnnnnnnnnnnnnnnnnnnnnnnnnnnnnnnnnnnnnnnnnnnnnnnnnnnnnnnnnnnnnnnnnnnnnnnnnnnnnnnnnnnnnnnnnnnnnnnnnnnnnnnnnnnnnnnnnnnnnnnnnnnnnnnnnnnnnnnnnnnnnnnnnnnnnnnnnnnnnnnnnnnnnnnnnnnnnnnnnnnnnnnnnnnnnnnnnnnnnnnnnnnnnnnnnnnnnnnnnnnnnnnnnnnnnnnnnnnnnnnnnnnnnnnnnnnnnnnnnnnnnnnnnnnnnnnnnnnnnnnnnnnnnnnnnnnnnnnnnnnnnnnnnnnnnnnnnnnnnnnnnnnnnnnnnnnnnnnnnnnnnnnnnnnnnnnnnnnnnnnnnnnnnnnnnnnnnnnnnnnnnnnnnnnnnnnnnnnnnnnnnnnnnnnnnnnnnnnnnnnnnnnnnnnnnnnnnnnnnnnnnnnnnnnnnnnnnnnnnnnnnnnnnnnnnnnnnnnnnnnnnnnnnnnnnnnnnnnnnnnnnnnnnnnnnnnnnnnnnnnnnnnnnnnnnnnnnnnnnnnnnnnnnnnnnnnnnnnnnnnnnnnnnnnnnnnnnnnnnnnnnnnnnnnnnnnnnnnnnnnnnnnnnnnnnnnnnnnnnnnnnnnnnnnnnnnnnnnnnnnnnnnnnnnnnnnnnnnnnnnnnnnnnnnnnnnnnnnnnnnnnnnnnnnnnnnnnnnnnnnnnnnnnnnnnnnnnnnnnnnnnnnnnnnnnnnnnnnnnnnnnnnnnnnnnnnnnnnnnnnnnnnnnnnnnnnnnnnnnnnnnnnnnnnnnnnnnnnnnnnnnnnnnnnnnnnnnnnnnnnnnnnnnnnnnnnnnnnnnnnnnnnnnnnnnnnnnnnnnnnnnnnnnnnnnnnnnnnnnnnnnnnnnnnnnnnnnnnnnnnnnnnnnnnnnnnnnnnnnnnnnnnnnnnnnnnnnnnnnnnnnnnnnnnnnnnnnnnnnnnnnnnnnnnnnnnnnnnnnnnnnnnnnnnnnnnnnnnnnnnnnnnnnnnnnnnnnnnnnnnnnnnnnnnnnnnnnnnnnnnnnnnnnnnnnnnnnnnnnnnnnnnnnnnnnnnnnnnnnnnnnnnnnnnnnnnnnnnnnnnnnnnnnnnnnnnnnnnnnnnnnnnnnnnnnnnnnnnnnnnnnnnnnnnnnnnnnnnnnnnnnnnnnnnnnnnnnnnnnnnnnnnnnnnnnnnnnnnnnnnnnnnnnnnnnnnnnnnnnnnnnnnnnnnnnnnnnnnnnnnnnnnnnnnnnnnnnnnnnnnnnnnnnnnnnnnnnnnnnnnnnnnnnnnnnnnnnnnnnnnnnnnnnnnnnnnnnnnnnnnnnnnnnnnnnnnnnnnnnnnnnnnnnnnnnnnnnnnnnnnnnnnnnnnnnnnnnnnnnnnnnnnnnnnnnnnnnnnnnnnnnnnnnnnnnnnnnnnnnnnnnnnnnnnnnnnnnnnnnnnnnnnnnnnnnnnnnnnnnnnnnnnnnnnnnnnnnnnnnnnnnnnnnnnnnnnnnnnnnnnnnnnnnnnnnnnnnnnnnnnnnnnnnnnnnnnnnnnnnnnnnnnnnnnnnnnnnnnnnnnnnnnnnnnnnnnnnnnnnnnnnnnnnnnnnnnnnnnnnnnnnnnnnnnnnnnnnnnnnnnnnnnnnnnnnnnnnnnnnnnnnnnnnnnnnnnnnnnnnnnnnnnnnnnnnnnnnnnnnnnnnnnnnnnnnnnnnnnnnnnnnnnnnnnnnnnnnnnnnnnnnnnnnnnnnnnnnnnnnnnnnnnnnnnnnnnnnnnnnnnnnnnnnnnnnnnnnnnnnnnnnnnnnnnnnnnnnnnnnnnnnnnnnnnnnnnnnnnnnnnnnnnnnnnnnnnnnnnnnnnnnnnnnnnnnnnnnnnnnnnnnnnnnnnnnnnnnnnnnnnnnnnnnnnnnnnnnnnnnnnnnnnnnnnnnnnnnnnnnnnnnnnnnnnnnnnnnnnnnnnnnnnnnnnnnnnnnnnnnnnnnnnnnnnnnnnnnnnnnnnnnnnnnnnnnnnnnnnnnnnnnnnnnnnnnnnnnnnnnnnnnnnnnnnnnnnnnnnnnnnnnnnnnnnnnnnnnnnnnnnnnnnnnnnnnnnnnnnnnnnnnnnnnnnnnnnnnnnnnnnnnnnnnnnnnnnnnnnnnnnnnnnnnnnnnnnnnnnnnnnnnnnnnnnnnnnnnnnnnnnnnnnnnnnnnnnnnnnnnnnnnnnnnnnnnnnnnnnnnnnnnnnnnnnnnnnnnnnnnnnnnnnnnnnnnnnnnnnnnnnnnnnnnnnnnnnnnnnnnnnnnnnnnnnnnnnnnnnnnnnnnnnnnnnnnnnnnnnnnnnnnnnnnnnnnnnnnnnnnnnnnnnnnnnnnnnnnnnnnnnnnnnnnnnnnnnnnnnnnnnnnnnnnnnnnnnnnnnnnnnnnnnnnnnnnnnnnnnnnnnnnnnnnnnnnnnnnnnnnnnnnnnnnnnnnnnnnnnnnnnnnnnnnnnnnnnnnnnnnnnnnnnnnnnnnnnnnnnnnnnnnnnnnnnnnnnnnnnnnnnnnnnnnnnnnnnnnnnnnnnnnnnnnnnnnnnnnnnnnnnnnnnnnnnnnnnnnnnnnnnnnnnnnnnnnnnnnnnnnnnnnnnnnnnnnnnnnnnnnnnnnnnnnnnnnnnnnnnnnnnnnnnnnnnnnnnnnnnnnnnnnnnnnnnnnnnnnnnnnnnnnnnnnnnnnnnnnnnnnnnnnnnnnnnnnnnnnnnnnnnnnnnnnnnnnnnnnnnnnnnnnnnnnnnnnnnnnnnnnnnnnnnnnnnnnnnnnnnnnnnnnnnnnnnnnnnnnnnnnnnnnnnnnnnnnnnnnnnnnnnnnnnnnnnnnnnnnnnnnnnnnnnnnnnnnnnnnnnnnnnnnnnnnnnnnnnnnnnnnnnnnnnnnnnnnnnnnnnnnnnnnnnnnnnnnnnnnnnnnnnnnnnnnnnnnnnnnnnnnnnnnnnnnnnnnnnnnnnnnnnnnnnnnnnnnnnnnnnnnnnnnnnnnnnnnnnnnnnnnnnnnnnnnnnnnnnnnnnnnnnnnnnnnnnnnnnnnnnnnnnnnnnnnnnnnnnnnnnnnnnnnnnnnnnnnnnnnnnnnnnnnnnnnnnnnnnnnnnnnnnnnnnnnnnnnnnnnnnnnnnnnnnnnnnnnnnnnnnnnnnnnnnnnnnnnnnnnnnnnnnnnnnnnnnnnnnnnnnnnnnnnnnnnnnnnnnnnnnnnnnnnnnnnnnnnnnnnnnnnnnnnnnnnnnnnnnnnnnnnnnnnnnnnnnnnnnnnnnnnnnnnnnnnnnnnnnnnnnnnnnnnnnnnnnnnnnnnnnnnnnnnnnnnnnnnnnnnnnnnnnnnnnnnnnnnnnnnnnnnnnnnnnnnnnnnnnnnnnnnnnnnnnnnnnnnnnnnnnnnnnnnnnnnnnnnnnnnnnnnnnnnnnnnnnnnnnnnnnnnnnnnnnnnnnnnnnnnnnnnnnnnnnnnnnnnnnnnnnnnnnnnnnnnnnnnnnnnnnnnnnnnnnnnnnnnnnnnnnnnnnnnnnnnnnnnnnnnnnnnnnnnnnnnnnnnnnnnnnnnnnnnnnnnnnnnnnnnnnnnnnnnnnnnnnnnnnnnnnnnnnnnnnnnnnnnnnnnnnnnnnnnnnnnnnnnnnnnnnnnnnnnnnnnnnnnnnnnnnnnnnnnnnnnnnnnnnnnnnnnnnnnnnnnnnnnnnnnnnnnnnnnnnnnnnnnnnnnnnnnnnnnnnnnnnnnnnnnnnnnnnnnnnnnnnnnnnnnnnnnnnnnnnnnnnnnnnnnnnnnnnnnnnnnnnnnnnnnnnnnnnnnnnnnnnnnnnnnnnnnnnnnnnnnnnnnnnnnnnnnnnnnnnnnnnnnnnnnnnnnnnnnnnnnnnnnnnnnnnnnnnnnnnnnnnnnnnnnnnnnnnnnnnnnnnnnnnnnnnnnnnnnnnnnnnnnnnnnnnnnnnnnnnnnnnnnnnnnnnnnnnnnnnnnnnnnnnnnnnnnnnnnnnnnnnnnnnnnnnnnnnnnnnnnnnnnnnnnnnnnnnnnnnnnnnnnnnnnnnnnnnnnnnnnnnnnnnnnnnnnnnnnnnnnnnnnnnnnnnnnnnnnnnnnnnnnnnnnnnnnnnnnnnnnnnnnnnnnnnnnnnnnnnnnnnnnnnnnnnnnnnnnnnnnnnnnnnnnnnnnnnnnnnnnnnnnnnnnnnnnnnnnnnnnnnnnnnnnnnnnnnnnnnnnnnnnnnnnnnnnnnnnnnnnnnnnnnnnnnnnnnnnnnnnnnnnnnnnnnnnnnnnnnnnnnnnnnnnnnnnnnnnnnnnnnnnnnnnnnnnnnnnnnnnnnnnnnnnnnnnnnnnnnnnnnnnnnnnnnnnnnnnnnnnnnnnnnnnnnnnnnnnnnnnnnnnnnnnnnnnnnnnnnnnnnnnnnnnnnnnnnnnnnnnnnnnnnnnnnnnnnnnnnnnnnnnnnnnnnnnnnnnnnnnnnnnnnnnnnnnnnnnnnnnnnnnnnnnnnnnnnnnnnnnnnnnnnnnnnnnnnnnnnnnnnnnnnnnnnnnnnnnnnnnnnnnnnnnnnnnnnnnnnnnnnnnnnnnnnnnnnnnnnnnnnnnnnnnnnnnnnnnnnnnnnnnnnnnnnnnnnnnnnnnnnnnnnnnnnnnnnnnnnnnnnnnnnnnnnnnnnnnnnnnnnnnnnnnnnnnnnnnnnnnnnnnnnnnnnnnnnnnnnnnnnnnnnnnnnnnnnnnnnnnnnnnnnnnnnnnnnnnnnnnnnnnnnnnnnnnnnnnnnnnnnnnnnnnnnnnnnnnnnnnnnnnnnnnnnnnnnnnnnnnnnnnnnnnnnnnnnnnnnnnnnnnnnnnnnnnnnnnnnnnnnnnnnnnnnnnnnnnnnnnnnnnnnnnnnnnnnnnnnnnnnnnnnnnnnnnnnnnnnnnnnnnnnnnnnnnnnnnnnnnnnnnnnnnnnnnnnnnnnnnnnnnnnnnnnnnnnnnnnnnnnnnnnnnnnnnnnnnnnnnnnnnnnnnnnnnnnnnnnnnnnnnnnnnnnnnnnnnnnnnnnnnnnnnnnnnnnnnnnnnnnnnnnnnnnnnnnnnnnnnnnnnnnnnnnnnnnnnnnnnnnnnnnnnnnnnnnnnnnnnnnnnnnnnnnnnnnnnnnnnnnnnnnnnnnnnnnnnnnnnnnnnnnnnnnnnnnnnnnnnnnnnnnnnnnnnnnnnnnnnnnnnnnnnnnnnnnnnnnnnnnnnnnnnnnnnnnnnnnnnnnnnnnnnnnnnnnnnnnnnnnnnnnnnnnnnnnnnnnnnnnnnnnnnnnnnnnnnnnnnnnnnnnnnnnnnnnnnnnnnnnnnnnnnnnnnnnnnnnnnnnnnnnnnnnnnnnnnnnnnnnnnnnnnnnnnnnnnnnnnnnnnnnnnnnnnnnnnnnnnnnnnnnnnnnnnnnnnnnnnnnnnnnnnnnnnnnnnnnnnnnnnnnnnnnnnnnnnnnnnnnnnnnnnnnnnnnnnnnnnnnnnnnnnnnnnnnnnnnnnnnnnnnnnnnnnnnnnnnnnnnnnnnnnnnnnnnnnnnnnnnnnnnnnnnnnnnnnnnnnnnnnnnnnnnnnnnnnnnnnnnnnnnnnnnnnnnnnnnnnnnnnnnnnnnnnnnnnnnnnnnnnnnnnnnnnnnnnnnnnnnnnnnnnnnnnnnnnnnnnnnnnnnnnnnnnnnnnnnnnnnnnnnnnnnnnnnnnnnnnnnnnnnnnnnnnnnnnnnnnnnnnnnnnnnnnnnnnnnnnnnnnnnnnnnnnnnnnnnnnnnnnnnnnnnnnnnnnnnnnnnnnnnnnnnnnnnnnnnnnnnnnnnnnnnnnnnnnnnnnnnnnnnnnnnnnnnnnnnnnnnnnnnnnnnnnnnnnnnnnnnnnnnnnnnnnnnnnnnnnnnnnnnnnnnnnnnnnnnnnnnnnnnnnnnnnnnnnnnnnnnnnnnnnnnnnnnnnnnnnnnnnnnnnnnnnnnnnnnnnnnnnnnnnnnnnnnnnnnnnnnnnnnnnnnnnnnnnnnnnnnnnnnnnnnnnnnnnnnnnnnnnnnnnnnnnnnnnnnnnnnnnnnnnnnnnnnnnnnnnnnnnnnnnnnnnnnnnnnnnnnnnnnnnnnnnnnnnnnnnnnnnnnnnnnnnnnnnnnnnnnnnnnnnnnnnnnnnnnnnnnnnnnnnnnnnnnnnnnnnnnnnnnnnnnnnnnnnnnnnnnnnnnnnnnnnnnnnnnnnnnnnnnnnnnnnnnnnnnnnnnnnnnnnnnnnnnnnnnnnnnnnnnnnnnnnnnnnnnnnnnnnnnnnnnnnnnnnnnnnnnnnnnnnnnnnnnnnnnnnnnnnnnnnnnnnnnnnnnnnnnnnnnnnnnnnnnnnnnnnnnnnnnnnnnnnnnnnnnnnnnnnnnnnnnnnnnnnnnnnnnnnnnnnnnnnnnnnnnnnnnnnnnnnnnnnnnnnnnnnnnnnnnnnnnnnnnnnnnnnnnnnnnnnnnnnnnnnnnnnnnnnnnnnnnnnnnnnnnnnnnnnnnnnnnnnnnnnnnnnnnnnnnnnnnnnnnnnnnnnnnnnnnnnnnnnnnnnnnnnnnnnnnnnnnnnnnnnnnnnnnnnnnnnnnnnnnnnnnnnnnnnnnnnnnnnnnnnnnnnnnnnnnnnnnnnnnnnnnnnnnnnnnnnnnnnnnnnnnnnnnnnnnnnnnnnnnnnnnnnnnnnnnnnnnnnnnnnnnnnnnnnnnnnnnnnnnnnnnnnnnnnnnnnnnnnnnnnnnnnnnnnnnnnnnnnnnnnnnnnnnnnnnnnnnnnnnnnnnnnnnnnnnnnnnnnnnnnnnnnnnnnnnnnnnnnnnnnnnnnnnnnnnnnnnnnnnnnnnnnnnnnnnnnnnnnnnnnnnnnnnnnnnnnnnnnnnnnnnnnnnnnnnnnnnnnnnnnnnnnnnnnnnnnnnnnnnnnnnnnnnnnnnnnnnnnnnnnnnnnnnnnnnnnnnnnnnnnnnnnnnnnnnnnnnnnnnnnnnnnnnnnnnnnnnnnnnnnnnnnnnnnnnnnnnnnnnnnnnnnnnnnnnnnnnnnnnnnnnnnnnnnnnnnnnnnnnnnnnnnnnnnnnnnnnnnnnnnnnnnnnnnnnnnnnnnnnnnnnnnnnnnnnnnnnnnnnnnnnnnnnnnnnnnnnnnnnnnnnnnnnnnnnnnnnnnnnnnnnnnnnnnnnnnnnnnnnnnnnnnnnnnnnnnnnnnnnnnnnnnnnnnnnnnnnnnnnnnnnnnnnnnnnnnnnnnnnnnnnnnnnnnnnnnnnnnnnnnnnnnnnnnnnnnnnnnnnnnnnnnnnnnnnnnnnnnnnnnnnnnnnnnnnnnnnnnnnnnnnnnnnnnnnnnnnnnnnnnnnnnnnnnnnnnnnnnnnnnnnnnnnnnnnnnnnnnnnnnnnnnnnnnnnnnnnnnnnnnnnnnnnnnnnnnnnnnnnnnnnnnnnnnnnnnnnnnnnnnnnnnnnnnnnnnnnnnnnnnnnnnnnnnnnnnnnnnnnnnnnnnnnnnnnnnnnnnnnnnnnnnnnnnnnnnnnnnnnnnnnnnnnnnnnnnnnnnnnnnnnnnnnnnnnnnnnnnnnnnnnnnnnnnnnnnnnnnnnnnnnnnnnnnnnnnnnnnnnnnnnnnnnnnnnnnnnnnnnnnnnnnnnnnnnnnnnnnnnnnnnnnnnnnnnnnnnnnnnnnnnnnnnnnnnnnnnnnnnnnnnnnnnnnnnnnnnnnnnnnnnnnnnnnnnnnnnnnnnnnnnnnnnnnnnnnnnnnnnnnnnnnnnnnnnnnnnnnnnnnnnnnnnnnnnnnnnnnnnnnnnnnnnnnnnnnnnnnnnnnnnnnnnnnnnnnnnnnnnnnnnnnnnnnnnnnnnnnnnnnnnnnnnnnnnnnnnnnnnnnnnnnnnnnnnnnnnnnnnnnnnnnnnnnnnnnnnnnnnnnnnnnnnnnnnnnnnnnnnnnnnnnnnnnnnnnnnnnnnnnnnnnnnnnnnnnnnnnnnnnnnnnnnnnnnnnnnnnnnnnnnnnnnnnnnnnnnnnnnnnnnnnnnnnnnnnnnnnnnnnnnnnnnnnnnnnnnnnnnnnnnnnnnnnnnnnnnnnnnnnnnnnnnnnnnnnnnnnnnnnnnnnnnnnnnnnnnnnnnnnnnnnnnnnnnnnnnnnnnnnnnnnnnnnnnnnnnnnnnnnnnnnnnnnnnnnnnnnnnnnnnnnnnnnnnnnnnnnnnnnnnnnnnnnnnnnnnnnnnnnnnnnnnnnnnnnnnnnnnnnnnnnnnnnnnnnnnnnnnnnnnnnnnnnnnnnnnnnnnnnnnnnnnnnnnnnnnnnnnnnnnnnnnnnnnnnnnnnnnnnnnnnnnnnnnnnnnnnnnnnnnnnnnnnnnnnnnnnnnnnnnnnnnnnnnnnnnnnnnnnnnnnnnnnnnnnnnnnnnnnnnnnnnnnnnnnnnnnnnnnnnnnnnnnnnnnnnnnnnnnnnnnnnnnnnnnnnnnnnnnnnnnnnnnnnnnnnnnnnnnnnnnnnnnnnnnnnnnnnnnnnnnnnnnnnnnnnnnnnnnnnnnnnnnnnnnnnnnnnnnnnnnnnnnnnnnnnnnnnnnnnnnnnnnnnnnnnnnnnnnnnnnnnnnnnnnnnnnnnnnnnnnnnnnnnnnnnnnnnnnnnnnnnnnnnnnnnnnnnnnnnnnnnnnnnnnnnnnnnnnnnnnnnnnnnnnnnnnnnnnnnnnnnnnnnnnnnnnnnnnnnnnnnnnnnnnnnnnnnnnnnnnnnnnnnnnnnnnnnnnnnnnnnnnnnnnnnnnnnnnnnnnnnnnnnnnnnnnnnnnnnnnnnnnnnnnnnnnnnnnnnnnnnnnnnnnnnnnnnnnnnnnnnnnnnnnnnnnnnnnnnnnnnnnnnnnnnnnnnnnnnnnnnnnnnnnnnnnnnnnnnnnnnnnnnnnnnnnnnnnnnnnnnnnnnnnnnnnnnnnnnnnnnnnnnnnnnnnnnnnnnnnnnnnnnnnnnnnnnnnnnnnnnnnnnnnnnnnnnnnnnnnnnnnnnnnnnnnnnnnnnnnnnnnnnnnnnnnnnnnnnnnnnnnnnnnnnnnnnnnnnnnnnnnnnnnnnnnnnnnnnnnnnnnnnnnnnnnnnnnnnnnnnnnnnnnnnnnnnnnnnnnnnnnnnnnnnnnnnnnnnnnnnnnnnnnnnnnnnnnnnnnnnnnnnnnnnnnnnnnnnnnnnnnnnnnnnnnnnnnnnnnnnnnnnnnnnnnnnnnnnnnnnnnnnnnnnnnnnnnnnnnnnnnnnnnnnnnnnnnnnnnnnnnnnnnnnnnnnnnnnnnnnnnnnnnnnnnnnnnnnnnnnnnnnnnnnnnnnnnnnnnnnnnnnnnnnnnnnnnnnnnnnnnnnnnnnnnnnnnnnnnnnnnnnnnnnnnnnnnnnnnnnnnnnnnnnnnnnnnnnnnnnnnnnnnnnnnnnnnnnnnnnnnnnnnnnnnnnnnnnnnnnnnnnnnnnnnnnnnnnnnnnnnnnnnnnnnnnnnnnnnnnnnnnnnnnnnnnnnnnnnnnnnnnnnnnnnnnnnnnnnnnnnnnnnnnnnnnnnnnnnnnnnnnnnnnnnnnnnnnnnnnnnnnnnnnnnnnnnnnnnnnnnnnnnnnnnnnnnnnnnnnnnnnnnnnnnnnnnnnnnnnnnnnnnnnnnnnnnnnnnnnnnnnnnnnnnnnnnnnnnnnnnnnnnnnnnnnnnnnnnnnnnnnnnnnnnnnnnnnnnnnnnnnnnnnnnnnnnnnnnnnnnnnnnnnnnnnnnnnnnnnnnnnnnnnnnnnnnnnnnnnnnnnnnnnnnnnnnnnnnnnnnnnnnnnnnnnnnnnnnnnnnnnnnnnnnnnnnnnnnnnnnnnnnnnnnnnnnnnnnnnnnnnnnnnnnnnnnnnnnnnnnnnnnnnnnnnnnnnnnnnnnnnnnnnnnnnnnnnnnnnnnnnnnnnnnnnnnnnnnnnnnnnnnnnnnnnnnnnnnnnnnnnnnnnnnnnnnnnnnnnnnnnnnnnnnnnnnnnnnnnnnnnnnnnnnnnnnnnnnnnnnnnnnnnnnnnnnnnnnnnnnnnnnnnnnnnnnnnnnnnnnnnnnnnnnnnnnnnnnnnnnnnnnnnnnnnnnnnnnnnnnnnnnnnnnnnnnnnnnnnnnnnnnnnnnnnnnnnnnnnnnnnnnnnnnnnnnnnnnnnnnnnnnnnnnnnnnnnnnnnnnnnnnnnnnnnnnnnnnnnnnnnnnnnnnnnnnnnnnnnnnnnnnnnnnnnnnnnnnnnnnnnnnnnnnnnnnnnnnnnnnnnnnnnnnnnnnnnnnnnnnnnnnnnnnnnnnnnnnnnnnnnnnnnnnnnnnnnnnnnnnnnnnnnnnnnnnnnnnnnnnnnnnnnnnnnnnnnnnnnnnnnnnnnnnnnnnnnnnnnnnnnnnnnnnnnnnnnnnnnnnnnnnnnnnnnnnnnnnnnnnnnnnnnnnnnnnnnnnnnnnnnnnnnnnnnnnnnnnnnnnnnnnnnnnnnnnnnnnnnnnnnnnnnnnnnnnnnnnnnnnnnnnnnnnnnnnnnnnnnnnnnnnnnnnnnnnnnnnnnnnnnnnnnnnnnnnnnnnnnnnnnnnnnnnnnnnnnnnnnnnnnnnnnnnnnnnnnnnnnnnnnnnnnnnnnnnnnnnnnnnnnnnnnnnnnnnnnnnnnnnnnnnnnnnnnnnnnnnnnnnnnnnnnnnnnnnnnnnnnnnnnnnnnnnnnnnnnnnnnnnnnnnnnnnnnnnnnnnnnnnnnnnnnnnnnnnnnnnnnnnnnnnnnnnnnnnnnnnnnnnnnnnnnnnnnnnnnnnnnnnnnnnnnnnnnnnnnnnnnnnnnnnnnnnnnnnnnnnnnnnnnnnnnnnnnnnnnnnnnnnnnnnnnnnnnnnnnnnnnnnnnnnnnnnnnnnnnnnnnnnnnnnnnnnnnnnnnnnnnnnnnnnnnnnnnnnnnnnnnnnnnnnnnnnnnnnnnnnnnnnnnnnnnnnnnnnnnnnnnnnnnnnnnnnnnnnnnnnnnnnnnnnnnnnnnnnnnnnnnnnnnnnnnnnnnnnnnnnnnnnnnnnnnnnnnnnnnnnnnnnnnnnnnnnnnnnnnnnnnnnnnnnnnnnnnnnnnnnnnnnnnnnnnnnnnnnnnnnnnnnnnnnnnnnnnnnnnnnnnnnnnnnnnnnnnnnnnnnnnnnnnnnnnnnnnnnnnnnnnnnnnnnnnnnnnnnnnnnnnnnnnnnnnnnnnnnnnnnnnnnnnnnnnnnnnnnnnnnnnnnnnnnnnnnnnnnnnnnnnnnnnnnnnnnnnnnnnnnnnnnnnnnnnnnnnnnnnnnnnnnnnnnnnnnnnnnnnnnnnnnnnnnnnnnnnnnnnnnnnnnnnnnnnnnnnnnnnnnnnnnnnnnnnnnnnnnnnnnnnnnnnnnnnnnnnnnnnnnnnnnnnnnnnnnnnnnnnnnnnnnnnnnnnnnnnnnnnnnnnnnnnnnnnnnnnnnnnnnnnnnnnnnnnnnnnnnnnnnnnnnnnnnnnnnnnnnnnnnnnnnnnnnnnnnnnnnnnnnnnnnnnnnnnnnnnnnnnnnnnnnnnnnnnnnnnnnnnnnnnnnnnnnnnnnnnnnnnnnnnnnnnnnnnnnnnnnnnnnnnnnnnnnnnnnnnnnnnnnnnnnnnnnnnnnnnnnnnnnnnnnnnnnnnnnnnnnnnnnnnnnnnnnnnnnnnnnnnnnnnnnnnnnnnnnnnnnnnnnnnnnnnnnnnnnnnnnnnnnnnnnnnnnnnnnnnnnnnnnnnnnnnnnnnnnnnnnnnnnnnnnnnnnnnnnnnnnnnnnnnnnnnnnnnnnnnnnnnnnnnnnnnnnnnnnnnnnnnnnnnnnnnnnnnnnnnnnnnnnnnnnnnnnnnnnnnnnnnnnnnnnnnnnnnnnnnnnnnnnnnnnnnnnnnnnnnnnnnnnnnnnnnnnnnnnnnnnnnnnnnnnnnnnnnnnnnnnnnnnnnnnnnnnnnnnnnnnnnnnnnnnnnnnnnnnnnnnnnnnnnnnnnnnnnnnnnnnnnnnnnnnnnnnnnnnnnnnnnnnnnnnnnnnnnnnnnnnnnnnnnnnnnnnnnnnnnnnnnnnnnnnnnnnnnnnnnnnnnnnnnnnnnnnnnnnnnnnnnnnnnnnnnnnnnnnnnnnnnnnnnnnnnnnnnnnnnnnnnnnnnnnnnnnnnnnnnnnnnnnnnnnnnnnnnnnnnnnnnnnnnnnnnnnnnnnnnnnnnnnnnnnnnnnnnnnnnnnnnnnnnnnnnnnnnnnnnnnnnnnnnnnnnnnnnnnnnnnnnnnnnnnnnnnnnnnnnnnnnnnnnnnnnnnnnnnnnnnnnnnnnnnnnnnnnnnnnnnnnnnnnnnnnnnnnnnnnnnnnnnnnnnnnnnnnnnnnnnnnnnnnnnnnnnnnnnnnnnnnnnnnnnnnnnnnnnnnnnnnnnnnnnnnnnnnnnnnnnnnnnnnnnnnnnnnnnnnnnnnnnnnnnnnnnnnnnnnnnnnnnnnnnnnnnnnnnnnnnnnnnnnnnnnnnnnnnnnnnnnnnnnnnnnnnnnnnnnnnnnnnnnnnnnnnnnnnnnnnnnnnnnnnnnnnnnnnnnnnnnnnnnnnnnnnnnnnnnnnnnnnnnnnnnnnnnnnnnnnnnnnnnnnnnnnnnnnnnnnnnnnnnnnnnnnnnnnnnnnnnnnnnnnnnnnnnnnnnnnnnnnnnnnnnnnnnnnnnnnnnnnnnnnnnnnnnnnnnnnnnnnnnnnnnnnnnnnnnnnnnnnnnnnnnnnnnnnnnnnnnnnnnnnnnnnnnnnnnnnnnnnnnnnnnnnnnnnnnnnnnnnnnnnnnnnnnnnnnnnnnnnnnnnnnnnnnnnnnnnnnnnnnnnnnnnnnnnnnnnnnnnnnnnnnnnnnnnnnnnnnnnnnnnnnnnnnnnnnnnnnnnnnnnnnnnnnnnnnnnnnnnnnnnnnnnnnnnnnnnnnnnnnnnnnnnnnnnnnnnnnnnnnnnnnnnnnnnnnnnnnnnnnnnnnnnnnnnnnnnnnnnnnnnnnnnnnnnnnnnnnnnnnnnnnnnnnnnnnnnnnnnnnnnnnnnnnnnnnnnnnnnnnnnnnnnnnnnnnnnnnnnnnnnnnnnnnnnnnnnnnnnnnnnnnnnnnnnnnnnnnnnnnnnnnnnnnnnnnnnnnnnnnnnnnnnnnnnnnnnnnnnnnnnnnnnnnnnnnnnnnnnnnnnnnnnnnnnnnnnnnnnnnnnnnnnnnnnnnnnnnnnnnnnnnnnnnnnnnnnnnnnnnnnnnnnnnnnnnnnnnnnnnnnnnnnnnnnnnnnnnnnnnnnnnnnnnnnnnnnnnnnnnnnnnnnnnnnnnnnnnnnnnnnnnnnnnnnnnnnnnnnnnnnnnnnnnnnnnnnnnnnnnnnnnnnnnnnnnnnnnnnnnnnnnnnnnnnnnnnnnnnnnnnnnnnnnnnnnnnnnnnnnnnnnnnnnnnnnnnnnnnnnnnnnnnnnnnnnnnnnnnnnnnnnnnnnnnnnnnnnnnnnnnnnnnnnnnnnnnnnnnnnnnnnnnnnnnnnnnnnnnnnnnnnnnnnnnnnnnnnnnnnnnnnnnnnnnnnnnnnnnnnnnnnnnnnnnnnnnnnnnnnnnnnnnnnnnnnnnnnnnnnnnnnnnnnnnnnnnnnnnnnnnnnnnnnnnnnnnnnnnnnnnnnnnnnnnnnnnnnnnnnnnnnnnnnnnnnnnnnnnnnnnnnnnnnnnnnnnnnnnnnnnnnnnnnnnnnnnnnnnnnnnnnnnnnnnnnnnnnnnnnnnnnnnnnnnnnnnnnnnnnnnnnnnnnnnnnnnnnnnnnnnnnnnnnnnnnnnnnnnnnnnnnnnnnnnnnnnnnnnnnnnnnnnnnnnnnnnnnnnnnnnnnnnnnnnnnnnnnnnnnnnnnnnnnnnnnnnnnnnnnnnnnnnnnnnnnnnnnnnnnnnnnnnnnnnnnnnnnnnnnnnnnnnnnnnnnnnnnnnnnnnnnnnnnnnnnnnnnnnnnnnnnnnnnnnnnnnnnnnnnnnnnnnnnnnnnnnnnnnnnnnnnnnnnnnnnnnnnnnnnnnnnnnnnnnnnnnnnnnnnnnnnnnnnnnnnnnnnnnnnnnnnnnnnnnnnnnnnnnnnnnnnnnnnnnnnnnnnnnnnnnnnnnnnnnnnnnnnnnnnnnnnnnnnnnnnnnnnnnnnnnnnnnnnnnnnnnnnnnnnnnnnnnnnnnnnnnnnnnnnnnnnnnnnnnnnnnnnnnnnnnnnnnnnnnnnnnnnnnnnnnnnnnnnnnnnnnnnnnnnnnnnnnnnnnnnnnnnnnnnnnnnnnnnnnnnnnnnnnnnnnnnnnnnnnnnnnnnnnnnnnnnnnnnnnnnnnnnnnnnnnnnnnnnnnnnnnnnnnnnnnnnnnnnnnnnnnnnnnnnnnnnnnnnnnnnnnnnnnnnnnnnnnnnnnnnnnnnnnnnnnnnnnnnnnnnnnnnnnnnnnnnnnnnnnnnnnnnnnnnnnnnnnnnnnnnnnnnnnnnnnnnnnnnnnnnnnnnnnnnnnnnnnnnnnnnnnnnnnnnnnnnnnnnnnnnnnnnnnnnnnnnnnnnnnnnnnnnnnnnnnnnnnnnnnnnnnnnnnnnnnnnnnnnnnnnnnnnnnnnnnnnnnnnnnnnnnnnnnnnnnnnnnnnnnnnnnnnnnnnnnnnnnnnnnnnnnnnnnnnnnnnnnnnnnnnnnnnnnnnnnnnnnnnnnnnnnnnnnnnnnnnnnnnnnnnnnnnnnnnnnnnnnnnnnnnnnnnnnnnnnnnnnnnnnnnnnnnnnnnnnnnnnnnnnnnnnnnnnnnnnnnnnnnnnnnnnnnnnnnnnnnnnnnnnnnnnnnnnnnnnnnnnnnnnnnnnnnnnnnnnnnnnnnnnnnnnnnnnnnnnnnnnnnnnnnnnnnnnnnnnnnnnnnnnnnnnnnnnnnnnnnnnnnnnnnnnnnnnnnnnnnnnnnnnnnnnnnnnnnnnnnnnnnnnnnnnnnnnnnnnnnnnnnnnnnnnnnnnnnnnnnnnnnnnnnnnnnnnnnnnnnnnnnnnnnnnnnnnnnnnnnnnnnnnnnnnnnnnnnnnnnnnnnnnnnnnnnnnnnnnnnnnnnnnnnnnnnnnnnnnnnnnnnnnnnnnnnnnnnnnnnnnnnnnnnnnnnnnnnnnnnnnnnnnnnnnnnnnnnnnnnnnnnnnnnnnnnnnnnnnnnnnnnnnnnnnnnnnnnnnnnnnnnnnnnnnnnnnnnnnnnnnnnnnnnnnnnnnnnnnnnnnnnnnnnnnnnnnnnnnnnnnnnnnnnnnnnnnnnnnnnnnnnnnnnnnnnnnnnnnnnnnnnnnnnnnnnnnnnnnnnnnnnnnnnnnnnnnnnnnnnnnnnnnnnnnnnnnnnnnnnnnnnnnnnnnnnnnnnnnnnnnnnnnnnnnnnnnnnnnnnnnnnnnnnnnnnnnnnnnnnnnnnnnnnnnnnnnnnnnnnnnnnnnnnnnnnnnnnnnnnnnnnnnnnnnnnnnnnnnnnnnnnnnnnnnnnnnnnnnnnnnnnnnnnnnnnnnnnnnnnnnnnnnnnnnnnnnnnnnnnnnnnnnnnnnnnnnnnnnnnnnnnnnnnnnnnnnnnnnnnnnnnnnnnnnnnnnnnnnnnnnnnnnnnnnnnnnnnnnnnnnnnnnnnnnnnnnnnnnnnnnnnnnnnnnnnnnnnnnnnnnnnnnnnnnnnnnnnnnnnnnnnnnnnnnnnnnnnnnnnnnnnnnnnnnnnnnnnnnnnnnnnnnnnnnnnnnnnnnnnnnnnnnnnnnnnnnnnnnnnnnnnnnnnnnnnnnnnnnnnnnnnnnnnnnnnnnnnnnnnnnnnnnnnnnnnnnnnnnnnnnnnnnnnnnnnnnnnnnnnnnnnnnnnnnnnnnnnnnnnnnnnnnnnnnnnnnnnnnnnnnnnnnnnnnnnnnnnnnnnnnnnnnnnnnnnnnnnnnnnnnnnnnnnnnnnnnnnnnnnnnnnnnnnnnnnnnnnnnnnnnnnnnnnnnnnnnnnnnnnnnnnnnnnnnnnnnnnnnnnnnnnnnnnnnnnnnnnnnnnnnnnnnnnnnnnnnnnnnnnnnnnnnnnnnnnnnnnnnnnnnnnnnnnnnnnnnnnnnnnnnnnnnnnnnnnnnnnnnnnnnnnnnnnnnnnnnnnnnnnnnnnnnnnnnnnnnnnnnnnnnnnnnnnnnnnnnnnnnnnnnnnnnnnnnnnnnnnnnnnnnnnnnnnnnnnnnnnnnnnnnnnnnnnnnnnnnnnnnnnnnnnnnnnnnnnnnnnnnnnnnnnnnnnnnnnnnnnnnnnnnnnnnnnnnnnnnnnnnnnnnnnnnnnnnnnnnnnnnnnnnnnnnnnnnnnnnnnnnnnnnnnnnnnnnnnnnnnnnnnnnnnnnnnnnnnnnnnnnnnnnnnnnnnnnnnnnnnnnnnnnnnnnnnnnnnnnnnnnnnnnnnnnnnnnnnnnnnnnnnnnnnnnnnnnnnnnnnnnnnnnnnnnnnnnnnnnnnnnnnnnnnnnnnnnnnnnnnnnnnnnnnnnnnnnnnnnnnnnnnnnnnnnnnnnnnnnnnnnnnnnnnnnnnnnnnnnnnnnnnnnnnnnnnnnnnnnnnnnnnnnnnnnnnnnnnnnnnnnnnnnnnnnnnnnnnnnnnnnnnnnnnnnnnnnnnnnnnnnnnnnnnnnnnnnnnnnnnnnnnnnnnnnnnnnnnnnnnnnnnnnnnnnnnnnnnnnnnnnnnnnnnnnnnnnnnnnnnnnnnnnnnnnnnnnnnnnnnnnnnnnnnnnnnnnnnnnnnnnnnnnnnnnnnnnnnnnnnnnnnnnnnnnnnnnnnnnnnnnnnnnnnnnnnnnnnnnnnnnnnnnnnnnnnnnnnnnnnnnnnnnnnnnnnnnnnnnnnnnnnnnnnnnnnnnnnnnnnnnnnnnnnnnnnnnnnnnnnnnnnnnnnnnnnnnnnnnnnnnnnnnnnnnnnnnnnnnnnnnnnnnnnnnnnnnnnnnnnnnnnnnnnnnnnnnnnnnnnnnnnnnnnnnnnnnnnnnnnnnnnnnnnnnnnnnnnnnnnnnnnnnnnnnnnnnnnnnnnnnnnnnnnnnnnnnnnnnnnnnnnnnnnnnnnnnnnnnnnnnnnnnnnnnnnnnnnnnnnnnnnnnnnnnnnnnnnnnnnnnnnnnnnnnnnnnnnnnnnnnnnnnnnnnnnnnnnnnnnnnnnnnnnnnnnnnnnnnnnnnnnnnnnnnnnnnnnnnnnnnnnnnnnnnnnnnnnnnnnnnnnnnnnnnnnnnnnnnnnnnnnnnnnnnnnnnnnnnnnnnnnnnnnnnnnnnnnnnnnnnnnnnnnnnnnnnnnnnnnnnnnnnnnnnnnnnnnnnnnnnnnnnnnnnnnnnnnnnnnnnnnnnnnnnnnnnnnnnnnnnnnnnnnnnnnnnnnnnnnnnnnnnnnnnnnnnnnnnnnnnnnnnnnnnnnnnnnnnnnnnnnnnnnnnnnnnnnnnnnnnnnnnnnnnnnnnnnnnnnnnnnnnnnnnnnnnnnnnnnnnnnnnnnnnnnnnnnnnnnnnnnnnnnnnnnnnnnnnnnnnnnnnnnnnnnnnnnnnnnnnnnnnnnnnnnnnnnnnnnnnnnnnnnnnnnnnnnnnnnnnnnnnnnnnnnnnnnnnnnnnnnnnnnnnnnnnnnnnnnnnnnnnnnnnnnnnnnnnnnnnnnnnnnnnnnnnnnnnnnnnnnnnnnnnnnnnnnnnnnnnnnnnnnnnnnnnnnnnnnnnnnnnnnnnnnnnnnnnnnnnnnnnnnnnnnnnnnnnnnnnnnnnnnnnnnnnnnnnnnnnnnnnnnnnnnnnnnnnnnnnnnnnnnnnnnnnnnnnnnnnnnnnnnnnnnnnnnnnnnnnnnnnnnnnnnnnnnnnnnnnnnnnnnnnnnnnnnnnnnnnnnnnnnnnnnnnnnnnnnnnnnnnnnnnnnnnnnnnnnnnnnnnnnnnnnnnnnnnnnnnnnnnnnnnnnnnnnnnnnnnnnnnnnnnnnnnnnnnnnnnnnnnnnnnnnnnnnnnnnnnnnnnnnnnnnnnnnnnnnnnnnnnnnnnnnnnnnnnnnnnnnnnnnnnnnnnnnnnnnnnnnnnnnnnnnnnnnnnnnnnnnnnnnnnnnnnnnnnnnnnnnnnnnnnnnnnnnnnnnnnnnnnnnnnnnnnnnnnnnnnnnnnnnnnnnnnnnnnnnnnnnnnnnnnnnnnnnnnnnnnnnnnnnnnnnnnnnnnnnnnnnnnnnnnnnnnnnnnnnnnnnnnnnnnnnnnnnnnnnnnnnnnnnnnnnnnnnnnnnnnnnnnnnnnnnnnnnnnnnnnnnnnnnnnnnnnnnnnnnnnnnnnnnnnnnnnnnnnnnnnnnnnnnnnnnnnnnnnnnnnnnnnnnnnnnnnnnnnnnnnnnnnnnnnnnnnnnnnnnnnnnnnnnnnnnnnnnnnnnnnnnnnnnnnnnnnnnnnnnnnnnnnnnnnnnnnnnnnnnnnnnnnnnnnnnnnnnnnnnnnnnnnnnnnnnnnnnnnnnnnnnnnnnnnnnnnnnnnnnnnnnnnnnnnnnnnnnnnnnnnnnnnnnnnnnnnnnnnnnnnnnnnnnnnnnnnnnnnnnnnnnnnnnnnnnnnnnnnnnnnnnnnnnnnnnnnnnnnnnnnnnnnnnnnnnnnnnnnnnnnnnnnnnnnnnnnnnnnnnnnnnnnnnnnnnnnnnnnnnnnnnnnnnnnnnnnnnnnnnnnnnnnnnnnnnnnnnnnnnnnnnnnnnnnnnnnnnnnnnnnnnnnnnnnnnnnnnnnnnnnnnnnnnnnnnnnnnnnnnnnnnnnnnnnnnnnnnnnnnnnnnnnnnnnnnnnnnnnnnnnnnnnnnnnnnnnnnnnnnnnnnnnnnnnnnnnnnnnnnnnnnnnnnnnnnnnnnnnnnnnnnnnnnnnnnnnnnnnnnnnnnnnnnnnnnnnnnnnnnnnnnnnnnnnnnnnnnnnnnnnnnnnnnnnnnnnnnnnnnnnnnnnnnnnnnnnnnnnnnnnnnnnnnnnnnnnnnnnnnnnnnnnnnnnnnnnnnnnnnnnnnnnnnnnnnnnnnnnnnnnnnnnnnnnnnnnnnnnnnnnnnnnnnnnnnnnnnnnnnnnnnnnnnnnnnnnnnnnnnnnnnnnnnnnnnnnnnnnnnnnnnnnnnnnnnnnnnnnnnnnnnnnnnnnnnnnnnnnnnnnnnnnnnnnnnnnnnnnnnnnnnnnnnnnnnnnnnnnnnnnnnnnnnnnnnnnnnnnnnnnnnnnnnnnnnnnnnnnnnnnnnnnnnnnnnnnnnnnnnnnnnnnnnnnnnnnnnnnnnnnnnnnnnnnnnnnnnnnnnnnnnnnnnnnnnnnnnnnnnnnnnnnnnnnnnnnnnnnnnnnnnnnnnnnnnnnnnnnnnnnnnnnnnnnnnnnnnnnnnnnnnnnnnnnnnnnnnnnnnnnnnnnnnnnnnnnnnnnnnnnnnnnnnnnnnnnnnnnnnnnnnnnnnnnnnnnnnnnnnnnnnnnnnnnnnnnnnnnnnnnnnnnnnnnnnnnnnnnnnnnnnnnnnnnnnnnnnnnnnnnnnnnnnnnnnnnnnnnnnnnnnnnnnnnnnnnnnnnnnnnnnnnnnnnnnnnnnnnnnnnnnnnnnnnnnnnnnnnnnnnnnnnnnnnnnnnnnnnnnnnnnnnnnnnnnnnnnnnnnnnnnnnnnnnnnnnnnnnnnnnnnnnnnnnnnnnnnnnnnnnnnnnnnnnnnnnnnnnnnnnnnnnnnnnnnnnnnnnnnnnnnnnnnnnnnnnnnnnnnnnnnnnnnnnnnnnnnnnnnnnnnnnnnnnnnnnnnnnnnnnnnnnnnnnnnnnnnnnnnnnnnnnnnnnnnnnnnnnnnnnnnnnnnnnnnnnnnnnnnnnnnnnnnnnnnnnnnnnnnnnnnnnnnnnnnnnnnnnnnnnnnnnnnnnnnnnnnnnnnnnnnnnnnnnnnnnnnnnnnnnnnnnnnnnnnnnnnnnnnnnnnnnnnnnnnnnnnnnnnnnnnnnnnnnnnnnnnnnnnnnnnnnnnnnnnnnnnnnnnnnnnnnnnnnnnnnnnnnnnnnnnnnnnnnnnnnnnnnnnnnnnnnnnnnnnnnnnnnnnnnnnnnnnnnnnnnnnnnnnnnnnnnnnnnnnnnnnnnnnnnnnnnnnnnnnnnnnnnnnnnnnnnnnnnnnnnnnnnnnnnnnnnnnnnnnnnnnnnnnnnnnnnnnnnnnnnnnnnnnnnnnnnnnnnnnnnnnnnnnnnnnnnnnnnnnnnnnnnnnnnnnnnnnnnnnnnnnnnnnnnnnnnnnnnnnnnnnnnnnnnnnnnnnnnnnnnnnnnnnnnnnnnnnnnnnnnnnnnnnnnnnnnnnnnnnnnnnnnnnnnnnnnnnnnnnnnnnnnnnnnnnnnnnnnnnnnnnnnnnnnnnnnnnnnnnnnnnnnnnnnnnnnnnnnnnnnnnnnnnnnnnnnnnnnnnnnnnnnnnnnnnnnnnnnnnnnnnnnnnnnnnnnnnnnnnnnnnnnnnnnnnnnnnnnnnnnnnnnnnnnnnnnnnnnnnnnnnnnnnnnnnnnnnnnnnnnnnnnnnnnnnnnnnnnnnnnnnnnnnnnnnnnnnnnnnnnnnnnnnnnnnnnnnnnnnnnnnnnnnnnnnnnnnnnnnnnnnnnnnnnnnnnnnnnnnnnnnnnnnnnnnnnnnnnnnnnnnnnnnnnnnnnnnnnnnnnnnnnnnnnnnnnnnnnnnnnnnnnnnnnnnnnnnnnnnnnnnnnnnnnnnnnnnnnnnnnnnnnnnnnnnnnnnnnnnnnnnnnnnnnnnnnnnnnnnnnnnnnnnnnnnnnnnnnnnnnnnnnnnnnnnnnnnnnnnnnnnnnnnnnnnnnnnnnnnnnnnnnnnnnnnnnnnnnnnnnnnnnnnnnnnnnnnnnnnnnnnnnnnnnnnnnnnnnnnnnnnnnnnnnnnnnnnnnnnnnnnnnnnnnnnnnnnnnnnnnnnnnnnnnnnnnnnnnnnnnnnnnnnnnnnnnnnnnnnnnnnnnnnnnnnnnnnnnnnnnnnnnnnnnnnnnnnnnnnnnnnnnnnnnnnnnnnnnnnnnnnnnnnnnnnnnnnnnnnnnnnnnnnnnnnnnnnnnnnnnnnnnnnnnnnnnnnnnnnnnnnnnnnnnnnnnnnnnnnnnnnnnnnnnnnnnnnnnnnnnnnnnnnnnnnnnnnnnnnnnnnnnnnnnnnnnnnnnnnnnnnnnnnnnnnnnnnnnnnnnnnnnnnnnnnnnnnnnnnnnnnnnnnnnnnnnnnnnnnnnnnnnnnnnnnnnnnnnnnnnnnnnnnnnnnnnnnnnnnnnnnnnnnnnnnnnnnnnnnnnnnnnnnnnnnnnnnnnnnnnnnnnnnnnnnnnnnnnnnnnnnnnnnnnnnnnnnnnnnnnnnnnnnnnnnnnnnnnnnnnnnnnnnnnnnnnnnnnnnnnnnnnnnnnnnnnnnnnnnnnnnnnnnnnnnnnnnnnnnnnnnnnnnnnnnnnnnnnnnnnnnnnnnnnnnnnnnnnnnnnnnnnnnnnnnnnnnnnnnnnnnnnnnnnnnnnnnnnnnnnnnnnnnnnnnnnnnnnnnnnnnnnnnnnnnnnnnnnnnnnnnnnnnnnnnnnnnnnnnnnnnnnnnnnnnnnnnnnnnnnnnnnnnnnnnnnnnnnnnnnnnnnnnnnnnnnnnnnnnnnnnnnnnnnnnnnnnnnnnnnnnnnnnnnnnnnnnnnnnnnnnnnnnnnnnnnnnnnnnnnnnnnnnnnnnnnnnnnnnnnnnnnnnnnnnnnnnnnnnnnnnnnnnnnnnnnnnnnnnnnnnnnnnnnnnnnnnnnnnnnnnnnnnnnnnnnnnnnnnnnnnnnnnnnnnnnnnnnnnnnnnnnnnnnnnnnnnnnnnnnnnnnnnnnnnnnnnnnnnnnnnnnnnnnnnnnnnnnnnnnnnnnnnnnnnnnnnnnnnnnnnnnnnnnnnnnnnnnnnnnnnnnnnnnnnnnnnnnnnnnnnnnnnnnnnnnnnnnnnnnnnnnnnnnnnnnnnnnnnnnnnnnnnnnnnnnnnnnnnnnnnnnnnnnnnnnnnnnnnnnnnnnnnnnnnnnnnnnnnnnnnnnnnnnnnnnnnnnnnnnnnnnnnnnnnnnnnnnnnnnnnnnnnnnnnnnnnnnnnnnnnnnnnnnnnnnnnnnnnnnnnnnnnnnnnnnnnnnnnnnnnnnnnnnnnnnnnnnnnnnnnnnnnnnnnnnnnnnnnnnnnnnnnnnnnnnnnnnnnnnnnnnnnnnnnnnnnnnnnnnnnnnnnnnnnnnnnnnnnnnnnnnnnnnnnnnnnnnnnnnnnnnnnnnnnnnnnnnnnnnnnnnnnnnnnnnnnnnnnnnnnnnnnnnnnnnnnnnnnnnnnnnnnnnnnnnnnnnnnnnnnnnnnnnnnnnnnnnnnnnnnnnnnnnnnnnnnnnnnnnnnnnnnnnnnnnnnnnnnnnnnnnnnnnnnnnnnnnnnnnnnnnnnnnnnnnnnnnnnnnnnnnnnnnnnnnnnnnnnnnnnnnnnnnnnnnnnnnnnnnnnnnnnnnnnnnnnnnnnnnnnnnnnnnnnnnnnnnnnnnnnnnnnnnnnnnnnnnnnnnnnnnnnnnnnnnnnnnnnnnnnnnnnnnnnnnnnnnnnnnnnnnnnnnnnnnnnnnnnnnnnnnnnnnnnnnnnnnnnnnnnnnnnnnnnnnnnnnnnnnnnnnnnnnnnnnnnnnnnnnnnnnnnnnnnnnnnnnnnnnnnnnnnnnnnnnnnnnnnnnnnnnnnnnnnnnnnnnnnnnnnnnnnnnnnnnnnnnnnnnnnnnnnnnnnnnnnnnnnnnnnnnnnnnnnnnnnnnnnnnnnnnnnnnnnnnnnnnnnnnnnnnnnnnnnnnnnnnnnnnnnnnnnnnnnnnnnnnnnnnnnnnnnnnnnnnnnnnnnnnnnnnnnnnnnnnnnnnnnnnnnnnnnnnnnnnnnnnnnnnnnnnnnnnnnnnnnnnnnnnnnnnnnnnnnnnnnnnnnnnnnnnnnnnnnnnnnnnnnnnnnnnnnnnnnnnnnnnnnnnnnnnnnnnnnnnnnnnnnnnnnnnnnnnnnnnnnnnnnnnnnnnnnnnnnnnnnnnnnnnnnnnnnnnnnnnnnnnnnnnnnnnnnnnnnnnnnnnnnnnnnnnnnnnnnnnnnnnnnnnnnnnnnnnnnnnnnnnnnnnnnnnnnnnnnnnnnnnnnnnnnnnnnnnnnnnnnnnnnnnnnnnnnnnnnnnnnnnnnnnnnnnnnnnnnnnnnnnnnnnnnnnnnnnnnnnnnnnnnnnnnnnnnnnnnnnnnnnnnnnnnnnnnnnnnnnnnnnnnnnnnnnnnnnnnnnnnnnnnnnnnnnnnnnnnnnnnnnnnnnnnnnnnnnnnnnnnnnnnnnnnnnnnnnnnnnnnnnnnnnnnnnnnnnnnnnnnnnnnnnnnnnnnnnnnnnnnnnnnnnnnnnnnnnnnnnnnnnnnnnnnnnnnnnnnnnnnnnnnnnnnnnnnnnnnnnnnnnnnnnnnnnnnnnnnnnnnnnnnnnnnnnnnnnnnnnnnnnnnnnnnnnnnnnnnnnnnnnnnnnnnnnnnnnnnnnnnnnnnnnnnnnnnnnnnnnnnnnnnnnnnnnnnnnnnnnnnnnnnnnnnnnnnnnnnnnnnnnnnnnnnnnnnnnnnnnnnnnnnnnnnnnnnnnnnnnnnnnnnnnnnnnnnnnnnnnnnnnnnnnnnnnnnnnnnnnnnnnnnnnnnnnnnnnnnnnnnnnnnnnnnnnnnnnnnnnnnnnnnnnnnnnnnnnnnnnnnnnnnnnnnnnnnnnnnnnnnnnnnnnnnnnnnnnnnnnnnnnnnnnnnnnnnnnnnnnnnnnnnnnnnnnnnnnnnnnnnnnnnnnnnnnnnnnnnnnnnnnnnnnnnnnnnnnnnnnnnnnnnnnnnnnnnnnnnnnnnnnnnnnnnnnnnnnnnnnnnnnnnnnnnnnnnnnnnnnnnnnnnnnnnnnnnnnnnnnnnnnnnnnnnnnnnnnnnnnnnnnnnnnnnnnnnnnnnnnnnnnnnnnnnnnnnnnnnnnnnnnnnnnnnnnnnnnnnnnnnnnnnnnnnnnnnnnnnnnnnnnnnnnnnnnnnnnnnnnnnnnnnnnnnnnnnnnnnnnnnnnnnnnnnnnnnnnnnnnnnnnnnnnnnnnnnnnnnnnnnnnnnnnnnnnnnnnnnnnnnnnnnnnnnnnnnnnnnnnnnnnnnnnnnnnnnnnnnnnnnnnnnnnnnnnnnnnnnnnnnnnnnnnnnnnnnnnnnnnnnnnnnnnnnnnnnnnnnnnnnnnnnnnnnnnnnnnnnnnnnnnnnnnnnnnnnnnnnnnnnnnnnnnnnnnnnnnnnnnnnnnnnnnnnnnnnnnnnnnnnnnnnnnnnnnnnnnnnnnnnnnnnnnnnnnnnnnnnnnnnnnnnnnnnnnnnnnnnnnnnnnnnnnnnnnnnnnnnnnnnnnnnnnnnnnnnnnnnnnnnnnnnnnnnnnnnnnnnnnnnnnnnnnnnnnnnnnnnnnnnnnnnnnnnnnnnnnnnnnnnnnnnnnnnnnnnnnnnnnnnnnnnnnnnnnnnnnnnnnnnnnnnnnnnnnnnnnnnnnnnnnnnnnnnnnnnnnnnnnnnnnnnnnnnnnnnnnnnnnnnnnnnnnnnnnnnnnnnnnnnnnnnnnnnnnnnnnnnnnnnnnnnnnnnnnnnnnnnnnnnnnnnnnnnnnnnnnnnnnnnnnnnnnnnnnnnnnnnnnnnnnnnnnnnnnnnnnnnnnnnnnnnnnnnnnnnnnnnnnnnnnnnnnnnnnnnnnnnnnnnnnnnnnnnnnnnnnnnnnnnnnnnnnnnnnnnnnnnnnnnnnnnnnnnnnnnnnnnnnnnnnnnnnnnnnnnnnnnnnnnnnnnnnnnnnnnnnnnnnnnnnnnnnnnnnnnnnnnnnnnnnnnnnnnnnnnnnnnnnnnnnnnnnnnnnnnnnnnnnnnnnnnnnnnnnnnnnnnnnnnnnnnnnnnnnnnnnnnnnnnnnnnnnnnnnnnnnnnnnnnnnnnnnnnnnnnnnnnnnnnnnnnnnnnnnnnnnnnnnnnnnnnnnnnnnnnnnnnnnnnnnnnnnnnnnnnnnnnnnnnnnnnnnnnnnnnnnnnnnnnnnnnnnnnnnnnnnnnnnnnnnnnnnnnnnnnnnnnnnnnnnnnnnnnnnnnnnnnnnnnnnnnnnnnnnnnnnnnnnnnnnnnnnnnnnnnnnnnnnnnnnnnnnnnnnnnnnnnnnnnnnnnnnnnnnnnnnnnnnnnnnnnnnnnnnnnnnnnnnnnnnnnnnnnnnnnnnnnnnnnnnnnnnnnnnnnnnnnnnnnnnnnnnnnnnnnnnnnnnnnnnnnnnnnnnnnnnnnnnnnnnnnnnnnnnnnnnnnnnnnnnnnnnnnnnnnnnnnnnnnnnnnnnnnnnnnnnnnnnnnnnnnnnnnnnnnnnnnnnnnnnnnnnnnnnnnnnnnnnnnnnnnnnnnnnnnnnnnnnnnnnnnnnnnnnnnnnnnnnnnnnnnnnnnnnnnnnnnnnnnnnnnnnnnnnnnnnnnnnnnnnnnnnnnnnnnnnnnnnnnnnnnnnnnnnnnnnnnnnnnnnnnnnnnnnnnnnnnnnnnnnnnnnnnnnnnnnnnnnnnnnnnnnnnnnnnnnnnnnnnnnnnnnnnnnnnnnnnnnnnnnnnnnnnnnnnnnnnnnnnnnnnnnnnnnnnnnnnnnnnnnnnnnnnnnnnnnnnnnnnnnnnnnnnnnnnnnnnnnnnnnnnnnnnnnnnnnnnnnnnnnnnnnnnnnnnnnnnnnnnnnnnnnnnnnnnnnnnnnnnnnnnnnnnnnnnnnnnnnnnnnnnnnnnnnnnnnnnnnnnnnnnnnnnnnnnnnnnnnnnnnnnnnnnnnnnnnnnnnnnnnnnnnnnnnnnnnnnnnnnnnnnnnnnnnnnnnnnnnnnnnnnnnnnnnnnnnnnnnnnnnnnnnnnnnnnnnnnnnnnnnnnnnnnnnnnnnnnnnnnnnnnnnnnnnnnnnnnnnnnnnnnnnnnnnnnnnnnnnnnnnnnnnnnnnnnnnnnnnnnnnnnnnnnnnnnnnnnnnnnnnnnnnnnnnnnnnnnnnnnnnnnnnnnnnnnnnnnnnnnnnnnnnnnnnnnnnnnnnnnnnnnnnnnnnnnnnnnnnnnnnnnnnnnnnnnnnnnnnnnnnnnnnnnnnnnnnnnnnnnnnnnnnnnnnnnnnnnnnnnnnnnnnnnnnnnnnnnnnnnnnnnnnnnnnnnnnnnnnnnnnnnnnnnnnnnnnnnnnnnnnnnnnnnnnnnnnnnnnnnnnnnnnnnnnnnnnnnnnnnnnnnnnnnnnnnnnnnnnnnnnnnnnnnnnnnnnnnnnnnnnnnnnnnnnnnnnnnnnnnnnnnnnnnnnnnnnnnnnnnnnnnnnnnnnnnnnnnnnnnnnnnnnnnnnnnnnnnnnnnnnnnnnnnnnnnnnnnnnnnnnnnnnnnnnnnnnnnnnnnnnnnnnnnnnnnnnnnnnnnnnnnnnnnnnnnnnnnnnnnnnnnnnnnnnnnnnnnnnnnnnnnnnnnnnnnnnnnnnnnnnnnnnnnnnnnnnnnnnnnnnnnnnnnnnnnnnnnnnnnnnnnnnnnnnnnnnnnnnnnnnnnnnnnnnnnnnnnnnnnnnnnnnnnnnnnnnnnnnnnnnnnnnnnnnnnnnnnnnnnnnnnnnnnnnnnnnnnnnnnnnnnnnnnnnnnnnnnnnnnnnnnnnnnnnnnnnnnnnnnnnnnnnnnnnnnnnnnnnnnnnnnnnnnnnnnnnnnnnnnnnnnnnnnnnnnnnnnnnnnnnnnnnnnnnnnnnnnnnnnnnnnnnnnnnnnnnnnnnnnnnnnnnnnnnnnnnnnnnnnnnnnnnnnnnnnnnnnnnnnnnnnnnnnnnnnnnnnnnnnnnnnnnnnnnnnnnnnnnnnnnnnnnnnnnnnnnnnnnnnnnnnnnnnnnnnnnnnnnnnnnnnnnnnnnnnnnnnnnnnnnnnnnnnnnnnnnnnnnnnnnnnnnnnnnnnnnnnnnnnnnnnnnnnnnnnnnnnnnnnnnnnnnnnnnnnnnnnnnnnnnnnnnnnnnnnnnnnnnnnnnnnnnnnnnnnnnnnnnnnnnnnnnnnnnnnnnnnnnnnnnnnnnnnnnnnnnnnnnnnnnnnnnnnnnnnnnnnnnnnnnnnnnnnnnnnnnnnnnnnnnnnnnnnnnnnnnnnnnnnnnnnnnnnnnnnnnnnnnnnnnnnnnnnnnnnnnnnnnnnnnnnnnnnnnnnnnnnnnnnnnnnnnnnnnnnnnnnnnnnnnnnnnnnnnnnnnnnnnnnnnnnnnnnnnnnnnnnnnnnnnnnnnnnnnnnnnnnnnnnnnnnnnnnnnnnnnnnnnnnnnnnnnnnnnnnnnnnnnnnnnnnnnnnnnnnnnnnnnnnnnnnnnnnnnnnnnnnnnnnnnnnnnnnnnnnnnnnnnnnnnnnnnnnnnnnnnnnnnnnnnnnnnnnnnnnnnnnnnnnnnnnnnnnnnnnnnnnnnnnnnnnnnnnnnnnnnnnnnnnnnnnnnnnnnnnnnnnnnnnnnnnnnnnnnnnnnnnnnnnnnnnnnnnnnnnnnnnnnnnnnnnnnnnnnnnnnnnnnnnnnnnnnnnnnnnnnnnnnnnnnnnnnnnnnnnnnnnnnnnnnnnnnnnnnnnnnnnnnnnnnnnnnnnnnnnnnnnnnnnnnnnnnnnnnnnnnnnnnnnnnnnnnnnnnnnnnnnnnnnnnnnnnnnnnnnnnnnnnnnnnnnnnnnnnnnnnnnnnnnnnnnnnnnnnnnnnnnnnnnnnnnnnnnnnnnnnnnnnnnnnnnnnnnnnnnnnnnnnnnnnnnnnnnnnnnnnnnnnnnnnnnnnnnnnnnnnnnnnnnnnnnnnnnnnnnnnnnnnnnnnnnnnnnnnnnnnnnnnnnnnnnnnnnnnnnnnnnnnnnnnnnnnnnnnnnnnnnnnnnnnnnnnnnnnnnnnnnnnnnnnnnnnnnnnnnnnnnnnnnnnnnnnnnnnnnnnnnnnnnnnnnnnnnnnnnnnnnnnnnnnnnnnnnnnnnnnnnnnnnnnnnnnnnnnnnnnnnnnnnnnnnnnnnnnnnnnnnnnnnnnnnnnnnnnnnnnnnnnnnnnnnnnnnnnnnnnnnnnnnnnnnnnnnnnnnnnnnnnnnnnnnnnnnnnnnnnnnnnnnnnnnnnnnnnnnnnnnnnnnnnnnnnnnnnnnnnnnnnnnnnnnnnnnnnnnnnnnnnnnnnnnnnnnnnnnnnnnnnnnnnnnnnnnnnnnnnnnnnnnnnnnnnnnnnnnnnnnnnnnnnnnnnnnnnnnnnnnnnnnnnnnnnnnnnnnnnnnnnnnnnnnnnnnnnnnnnnnnnnnnnnnnnnnnnnnnnnnnnnnnnnnnnnnnnnnnnnnnnnnnnnnnnnnnnnnnnnnnnnnnnnnnnnnnnnnnnnnnnnnnnnnnnnnnnnnnnnnnnnnnnnnnnnnnnnnnnnnnnnnnnnnnnnnnnnnnnnnnnnnnnnnnnnnnnnnnnnnnnnnnnnnnnnnnnnnnnnnnnnnnnnnnnnnnnnnnnnnnnnnnnnnnnnnnnnnnnnnnnnnnnnnnnnnnnnnnnnnnnnnnnnnnnnnnnnnnnnnnnnnnnnnnnnnnnnnnnnnnnnnnnnnnnnnnnnnnnnnnnnnnnnnnnnnnnnnnnnnnnnnnnnnnnnnnnnnnnnnnnnnnnnnnnnnnnnnnnnnnnnnnnnnnnnnnnnnnnnnnnnnnnnnnnnnnnnnnnnnnnnnnnnnnnnnnnnnnnnnnnnnnnnnnnnnnnnnnnnnnnnnnnnnnnnnnnnnnnnnnnnnnnnnnnnnnnnnnnnnnnnnnnnnnnnnnnnnnnnnnnnnnnnnnnnnnnnnnnnnnnnnnnnnnnnnnnnnnnnnnnnnnnnnnnnnnnnnnnnnnnnnnnnnnnnnnnnnnnnnnnnnnnnnnnnnnnnnnnnnnnnnnnnnnnnnnnnnnnnnnnnnnnnnnnnnnnnnnnnnnnnnnnnnnnnnnnnnnnnnnnnnnnnnnnnnnnnnnnnnnnnnnnnnnnnnnnnnnnnnnnnnnnnnnnnnnnnnnnnnnnnnnnnnnnnnnnnnnnnnnnnnnnnnnnnnnnnnnnnnnnnnnnnnnnnnnnnnnnnnnnnnnnnnnnnnnnnnnnnnnnnnnnnnnnnnnnnnnnnnnnnnnnnnnnnnnnnnnnnnnnnnnnnnnnnnnnnnnnnnnnnnnnnnnnnnnnnnnnnnnnnnnnnnnnnnnnnnnnnnnnnnnnnnnnnnnnnnnnnnnnnnnnnnnnnnnnnnnnnnnnnnnnnnnnnnnnnnnnnnnnnnnnnnnnnnnnnnnnnnnnnnnnnnnnnnnnnnnnnnnnnnnnnnnnnnnnnnnnnnnnnnnnnnnnnnnnnnnnnnnnnnnnnnnnnnnnnnnnnnnnnnnnnnnnnnnnnnnnnnnnnnnnnnnnnnnnnnnnnnnnnnnnnnnnnnnnnnnnnnnnnnnnnnnnnnnnnnnnnnnnnnnnnnnnnnnnnnnnnnnnnnnnnnnnnnnnnnnnnnnnnnnnnnnnnnnnnnnnnnnnnnnnnnnnnnnnnnnnnnnnnnnnnnnnnnnnnnnnnnnnnnnnnnnnnnnnnnnnnnnnnnnnnnnnnnnnnnnnnnnnnnnnnnnnnnnnnnnnnnnnnnnnnnnnnnnnnnnnnnnnnnnnnnnnnnnnnnnnnnnnnnnnnnnnnnnnnnnnnnnnnnnnnnnnnnnnnnnnnnnnnnnnnnnnnnnnnnnnnnnnnnnnnnnnnnnnnnnnnnnnnnnnnnnnnnnnnnnnnnnnnnnnnnnnnnnnnnnnnnnnnnnnnnnnnnnnnnnnnnnnnnnnnnnnnnnnnnnnnnnnnnnnnnnnnnnnnnnnnnnnnnnnnnnnnnnnnnnnnnnnnnnnnnnnnnnnnnnnnnnnnnnnnnnnnnnnnnnnnnnnnnnnnnnnnnnnnnnnnnnnnnnnnnnnnnnnnnnnnnnnnnnnnnnnnnnnnnnnnnnnnnnnnnnnnnnnnnnnnnnnnnnnnnnnnnnnnnnnnnnnnnnnnnnnnnnnnnnnnnnnnnnnnnnnnnnnnnnnnnnnnnnnnnnnnnnnnnnnnnnnnnnnnnnnnnnnnnnnnnnnnnnnnnnnnnnnnnnnnnnnnnnnnnnnnnnnnnnnnnnnnnnnnnnnnnnnnnnnnnnnnnnnnnnnnnnnnnnnnnnnnnnnnnnnnnnnnnnnnnnnnnnnnnnnnnnnnnnnnnnnnnnnnnnnnnnnnnnnnnnnnnnnnnnnnnnnnnnnnnnnnnnnnnnnnnnnnnnnnnnnnnnnnnnnnnnnnnnnnnnnnnnnnnnnnnnnnnnnnnnnnnnnnnnnnnnnnnnnnnnnnnnnnnnnnnnnnnnnnnnnnnnnnnnnnnnnnnnnnnnnnnnnnnnnnnnnnnnnnnnnnnnnnnnnnnnnnnnnnnnnnnnnnnnnnnnnnnnnnnnnnnnnnnnnnnnnnnnnnnnnnnnnnnnnnnnnnnnnnnnnnnnnnnnnnnnnnnnnnnnnnnnnnnnnnnnnnnnnnnnnnnnnnnnnnnnnnnnnnnnnnnnnnnnnnnnnnnnnnnnnnnnnnnnnnnnnnnnnnnnnnnnnnnnnnnnnnnnnnnnnnnnnnnnnnnnnnnnnnnnnnnnnnnnnnnnnnnnnnnnnnnnnnnnnnnnnnnnnnnnnnnnnnnnnnnnnnnnnnnnnnnnnnnnnnnnnnnnnnnnnnnnnnnnnnnnnnnnnnnnnnnnnnnnnnnnnnnnnnnnnnnnnnnnnnnnnnnnnnnnnnnnnnnnnnnnnnnnnnnnnnnnnnnnnnnnnnnnnnnnnnnnnnnnnnnnnnnnnnnnnnnnnnnnnnnnnnnnnnnnnnnnnnnnnnnnnnnnnnnnnnnnnnnnnnnnnnnnnnnnnnnnnnnnnnnnnnnnnnnnnnnnnnnnnnnnnnnnnnnnnnnnnnnnnnnnnnnnnnnnnnnnnnnnnnnnnnnnnnnnnnnnnnnnnnnnnnnnnnnnnnnnnnnnnnnnnnnnnnnnnnnnnnnnnnnnnnnnnnnnnnnnnnnnnnnnnnnnnnnnnnnnnnnnnnnnnnnnnnnnnnnnnnnnnnnnnnnnnnnnnnnnnnnnnnnnnnnnnnnnnnnnnnnnnnnnnnnnnnnnnnnnnnnnnnnnnnnnnnnnnnnnnnnnnnnnnnnnnnnnnnnnnnnnnnnnnnnnnnnnnnnnnnnnnnnnnnnnnnnnnnnnnnnnnnnnnnnnnnnnnnnnnnnnnnnnnnnnnnnnnnnnnnnnnnnnnnnnnnnnnnnnnnnnnnnnnnnnnnnnnnnnnnnnnnnnnnnnnnnnnnnnnnnnnnnnnnnnnnnnnnnnnnnnnnnnnnnnnnnnnnnnnnnnnnnnnnnnnnnnnnnnnnnnnnnnnnnnnnnnnnnnnnnnnnnnnnnnnnnnnnnnnnnnnnnnnnnnnnnnnnnnnnnnnnnnnnnnnnnnnnnnnnnnnnnnnnnnnnnnnnnnnnnnnnnnnnnnnnnnnnnnnnnnnnnnnnnnnnnnnnnnnnnnnnnnnnnnnnnnnnnnnnnnnnnnnnnnnnnnnnnnnnnnnnnnnnnnnnnnnnnnnnnnnnnnnnnnnnnnnnnnnnnnnnnnnnnnnnnnnnnnnnnnnnnnnnnnnnnnnnnnnnnnnnnnnnnnnnnnnnnnnnnnnnnnnnnnnnnnnnnnnnnnnnnnnnnnnnnnnnnnnnnnnnnnnnnnnnnnnnnnnnnnnnnnnnnnnnnnnnnnnnnnnnnnnnnnnnnnnnnnnnnnnnnnnnnnnnnnnnnnnnnnnnnnnnnnnnnnnnnnnnnnnnnnnnnnnnnnnnnnnnnnnnnnnnnnnnnnnnnnnnnnnnnnnnnnnnnnnnnnnnnnnnnnnnnnnnnnnnnnnnnnnnnnnnnnnnnnnnnnnnnnnnnnnnnnnnnnnnnnnnnnnnnnnnnnnnnnnnnnnnnnnnnnnnnnnnnnnnnnnnnnnnnnnnnnnnnnnnnnnnnnnnnnnnnnnnnnnnnnnnnnnnnnnnnnnnnnnnnnnnnnnnnnnnnnnnnnnnnnnnnnnnnnnnnnnnnnnnnnnnnnnnnnnnnnnnnnnnnnnnnnnnnnnnnnnnnnnnnnnnnnnnnnnnnnnnnnnnnnnnnnnnnnnnnnnnnnnnnnnnnnnnnnnnnnnnnnnnnnnnnnnnnnnnnnnnnnnnnnnnnnnnnnnnnnnnnnnnnnnnnnnnnnnnnnnnnnnnnnnnnnnnnnnnnnnnnnnnnnnnnnnnnnnnnnnnnnnnnnnnnnnnnnnnnnnnnnnnnnnnnnnnnnnnnnnnnnnnnnnnnnnnnnnnnnnnnnnnnnnnnnnnnnnnnnnnnnnnnnnnnnnnnnnnnnnnnnnnnnnnnnnnnnnnnnnnnnnnnnnnnnnnnnnnnnnnnnnnnnnnnnnnnnnnnnnnnnnnnnnnnnnnnnnnnnnnnnnnnnnnnnnnnnnnnnnnnnnnnnnnnnnnnnnnnnnnnnnnnnnnnnnnnnnnnnnnnnnnnnnnnnnnnnnnnnnnnnnnnnnnnnnnnnnnnnnnnnnnnnnnnnnnnnnnnnnnnnnnnnnnnnnnnnnnnnnnnnnnnnnnnnnnnnnnnnnnnnnnnnnnnnnnnnnnnnnnnnnnnnnnnnnnnnnnnnnnnnnnnnnnnnnnnnnnnnnnnnnnnnnnnnnnnnnnnnnnnnnnnnnnnnnnnnnnnnnnnnnnnnnnnnnnnnnnnnnnnnnnnnnnnnnnnnnnnnnnnnnnnnnnnnnnnnnnnnnnnnnnnnnnnnnnnnnnnnnnnnnnnnnnnnnnnnnnnnnnnnnnnnnnnnnnnnnnnnnnnnnnnnnnnnnnnnnnnnnnnnnnnnnnnnnnnnnnnnnnnnnnnnnnnnnnnnnnnnnnnnnnnnnnnnnnnnnnnnnnnnnnnnnnnnnnnnnnnnnnnnnnnnnnnnnnnnnnnnnnnnnnnnnnnnnnnnnnnnnnnnnnnnnnnnnnnnnnnnnnnnnnnnnnnnnnnnnnnnnnnnnnnnnnnnnnnnnnnnnnnnnnnnnnnnnnnnnnnnnnnnnnnnnnnnnnnnnnnnnnnnnnnnnnnnnnnnnnnnnnnnnnnnnnnnnnnnnnnnnnnnnnnnnnnnnnnnnnnnnnnnnnnnnnnnnnnnnnnnnnnnnnnnnnnnnnnnnnnnnnnnnnnnnnnnnnnnnnnnnnnnnnnnnnnnnnnnnnnnnnnnnnnnnnnnnnnnnnnnnnnnnnnnnnnnnnnnnnnnnnnnnnnnnnnnnnnnnnnnnnnnnnnnnnnnnnnnnnnnnnnnnnnnnnnnnnnnnnnnnnnnnnnnnnnnnnnnnnnnnnnnnnnnnnnnnnnnnnnnnnnnnnnnnnnnnnnnnnnnnnnnnnnnnnnnnnnnnnnnnnnnnnnnnnnnnnnnnnnnnnnnnnnnnnnnnnnnnnnnnnnnnnnnnnnnnnnnnnnnnnnnnnnnnnnnnnnnnnnnnnnnnnnnnnnnnnnnnnnnnnnnnnnnnnnnnnnnnnnnnnnnnnnnnnnnnnnnnnnnnnnnnnnnnnnnnnnnnnnnnnnnnnnnnnnnnnnnnnnnnnnnnnnnnnnnnnnnnnnnnnnnnnnnnnnnnnnnnnnnnnnnnnnnnnnnnnnnnnnnnnnnnnnnnnnnnnnnnnnnnnnnnnnnnnnnnnnnnnnnnnnnnnnnnnnnnnnnnnnnnnnnnnnnnnnnnnnnnnnnnnnnnnnnnnnnnnnnnnnnnnnnnnnnnnnnnnnnnnnnnnnnnnnnnnnnnnnnnnnnnnnnnnnnnnnnnnnnnnnnnnnnnnnnnnnnnnnnnnnnnnnnnnnnnnnnnnnnnnnnnnnnnnnnnnnnnnnnnnnnnnnnnnnnnnnnnnnnnnnnnnnnnnnnnnnnnnnnnnnnnnnnnnnnnnnnnnnnnnnnnnnnnnnnnnnnnnnnnnnnnnnnnnnnnnnnnnnnnnnnnnnnnnnnnnnnnnnnnnnnnnnnnnnnnnnnnnnnnnnnnnnnnnnnnnnnnnnnnnnnnnnnnnnnnnnnnnnnnnnnnnnnnnnnnnnnnnnnnnnnnnnnnnnnnnnnnnnnnnnnnnnnnnnnnnnnnnnnnnnnnnnnnnnnnnnnnnnnnnnnnnnnnnnnnnnnnnnnnnnnnnnnnnnnnnnnnnnnnnnnnnnnnnnnnnnnnnnnnnnnnnnnnnnnnnnnnnnnnnnnnnnnnnnnnnnnnnnnnnnnnnnnnnnnnnnnnnnnnnnnnnnnnnnnnnnnnnnnnnnnnnnnnnnnnnnnnnnnnnnnnnnnnnnnnnnnnnnnnnnnnnnnnnnnnnnnnnnnnnnnnnnnnnnnnnnnnnnnnnnnnnnnnnnnnnnnnnnnnnnnnnnnnnnnnnnnnnnnnnnnnnnnnnnnnnnnnnnnnnnnnnnnnnnnnnnnnnnnnnnnnnnnnnnnnnnnnnnnnnnnnnnnnnnnnnnnnnnnnnnnnnnnnnnnnnnnnnnnnnnnnnnnnnnnnnnnnnnnnnnnnnnnnnnnnnnnnnnnnnnnnnnnnnnnnnnnnnnnnnnnnnnnnnnnnnnnnnnnnnnnnnnnnnnnnnnnnnnnnnnnnnnnnnnnnnnnnnnnnnnnnnnnnnnnnnnnnnnnnnnnnnnnnnnnnnnnnnnnnnnnnnnnnnnnnnnnnnnnnnnnnnnnnnnnnnnnnnnnnnnnnnnnnnnnnnnnnnnnnnnnnnnnnnnnnnnnnnnnnnnnnnnnnnnnnnnnnnnnnnnnnnnnnnnnnnnnnnnnnnnnnnnnnnnnnnnnnnnnnnnnnnnnnnnnnnnnnnnnnnnnnnnnnnnnnnnnnnnnnnnnnnnnnnnnnnnnnnnnnnnnnnnnnnnnnnnnnnnnnnnnnnnnnnnnnnnnnnnnnnnnnnnnnnnnnnnnnnnnnnnnnnnnnnnnnnnnnnnnnnnnnnnnnnnnnnnnnnnnnnnnnnnnnnnnnnnnnnnnnnnnnnnnnnnnnnnnnnnnnnnnnnnnnnnnnnnnnnnnnnnnnnnnnnnnnnnnnnnnnnnnnnnnnnnnnnnnnnnnnnnnnnnnnnnnnnnnnnnnnnnnnnnnnnnnnnnnnnnnnnnnnnnnnnnnnnnnnnnnnnnnnnnnnnnnnnnnnnnnnnnnnnnnnnnnnnnnnnnnnnnnnnnnnnnnnnnnnnnnnnnnnnnnnnnnnnnnnnnnnnnnnnnnnnnnnnnnnnnnnnnnnnnnnnnnnnnnnnnnnnnnnnnnnnnnnnnnnnnnnnnnnnnnnnnnnnnnnnnnnnnnnnnnnnnnnnnnnnnnnnnnnnnnnnnnnnnnnnnnnnnnnnnnnnnnnnnnnnnnnnnnnnnnnnnnnnnnnnnnnnnnnnnnnnnnnnnnnnnnnnnnnnnnnnnnnnnnnnnnnnnnnnnnnnnnnnnnnnnnnnnnnnnnnnnnnnnnnnnnnnnnnnnnnnnnnnnnnnnnnnnnnnnnnnnnnnnnnnnnnnnnnnnnnnnnnnnnnnnnnnnnnnnnnnnnnnnnnnnnnnnnnnnnnnnnnnnnnnnnnnnnnnnnnnnnnnnnnnnnnnnnnnnnnnnnnnnnnnnnnnnnnnnnnnnnnnnnnnnnnnnnnnnnnnnnnnnnnnnnnnnnnnnnnnnnnnnnnnnnnnnnnnnnnnnnnnnnnnnnnnnnnnnnnnnnnnnnnnnnnnnnnnnnnnnnnnnnnnnnnnnnnnnnnnnnnnnnnnnnnnnnnnnnnnnnnnnnnnnnnnnnnnnnnnnnnnnnnnnnnnnnnnnnnnnnnnnnnnnnnnnnnnnnnnnnnnnnnnnnnnnnnnnnnnnnnnnnnnnnnnnnnnnnnnnnnnnnnnnnnnnnnnnnnnnnnnnnnnnnnnnnnnnnnnnnnnnnnnnnnnnnnnnnnnnnnnnnnnnnnnnnnnnnnnnnnnnnnnnnnnnnnnnnnnnnnnnnnnnnnnnnnnnnnnnnnnnnnnnnnnnnnnnnnnnnnnnnnnnnnnnnnnnnnnnnnnnnnnnnnnnnnnnnnnnnnnnnnnnnnnnnnnnnnnnnnnnnnnnnnnnnnnnnnnnnnnnnnnnnnnnnnnnnnnnnnnnnnnnnnnnnnnnnnnnnnnnnnnnnnnnnnnnnnnnnnnnnnnnnnnnnnnnnnnnnnnnnnnnnnnnnnnnnnnnnnnnnnnnnnnnnnnnnnnnnnnnnnnnnnnnnnnnnnnnnnnnnnnnnnnnnnnnnnnnnnnnnnnnnnnnnnnnnnnnnnnnnnnnnnnnnnnnnnnnnnnnnnnnnnnnnnnnnnnnnnnnnnnnnnnnnnnnnnnnnnnnnnnnnnnnnnnnnnnnnnnnnnnnnnnnnnnnnnnnnnnnnnnnnnnnnnnnnnnnnnnnnnnnnnnnnnnnnnnnnnnnnnnnnnnnnnnnnnnnnnnnnnnnnnnnnnnnnnnnnnnnnnnnnnnnnnnnnnnnnnnnnnnnnnnnnnnnnnnnnnnnnnnnnnnnnnnnnnnnnnnnnnnnnnnnnnnnnnnnnnnnnnnnnnnnnnnnnnnnnnnnnnnnnnnnnnnnnnnnnnnnnnnnnnnnnnnnnnnnnnnnnnnnnnnnnnnnnnnnnnnnnnnnnnnnnnnnnnnnnnnnnnnnnnnnnnnnnnnnnnnnnnnnnnnnnnnnnnnnnnnnnnnnnnnnnnnnnnnnnnnnnnnnnnnnnnnnnnnnnnnnnnnnnnnnnnnnnnnnnnnnnnnnnnnnnnnnnnnnnnnnnnnnnnnnnnnnnnnnnnnnnnnnnnnnnnnnnnnnnnnnnnnnnnnnnnnnnnnnnnnnnnnnnnnnnnnnnnnnnnnnnnnnnnnnnnnnnnnnnnnnnnnnnnnnnnnnnnnnnnnnnnnnnnnnnnnnnnnnnnnnnnnnnnnnnnnnnnnnnnnnnnnnnnnnnnnnnnnnnnnnnnnnnnnnnnnnnnnnnnnnnnnnnnnnnnnnnnnnnnnnnnnnnnnnnnnnnnnnnnnnnnnnnnnnnnnnnnnnnnnnnnnnnnnnnnnnnnnnnnnnnnnnnnnnnnnnnnnnnnnnnnnnnnnnnnnnnnnnnnnnnnnnnnnnnnnnnnnnnnnnnnnnnnnnnnnnnnnnnnnnnnnnnnnnnnnnnnnnnnnnnnnnnnnnnnnnnnnnnnnnnnnnnnnnnnnnnnnnnnnnnnnnnnnnnnnnnnnnnnnnnnnnnnnnnnnnnnnnnnnnnnnnnnnnnnnnnnnnnnnnnnnnnnnnnnnnnnnnnnnnnnnnnnnnnnnnnnnnnnnnnnnnnnnnnnnnnnnnnnnnnnnnnnnnnnnnnnnnnnnnnnnnnnnnnnnnnnnnnnnnnnnnnnnnnnnnnnnnnnnnnnnnnnnnnnnnnnnnnnnnnnnnnnnnnnnnnnnnnnnnnnnnnnnnnnnnnnnnnnnnnnnnnnnnnnnnnnnnnnnnnnnnnnnnnnnnnnnnnnnnnnnnnnnnnnnnnnnnnnnnnnnnnnnnnnnnnnnnnnnnnnnnnnnnnnnnnnnnnnnnnnnnnnnnnnnnnnnnnnnnnnnnnnnnnnnnnnnnnnnnnnnnnnnnnnnnnnnnnnnnnnnnnnnnnnnnnnnnnnnnnnnnnnnnnnnnnnnnnnnnnnnnnnnnnnnnnnnnnnnnnnnnnnnnnnnnnnnnnnnnnnnnnnnnnnnnnnnnnnnnnnnnnnnnnnnnnnnnnnnnnnnnnnnnnnnnnnnnnnnnnnnnnnnnnnnnnnnnnnnnnnnnnnnnnnnnnnnnnnnnnnnnnnnnnnnnnnnnnnnnnnnnnnnnnnnnnnnnnnnnnnnnnnnnnnnnnnnnnnnnnnnnnnnnnnnnnnnnnnnnnnnnnnnnnnnnnnnnnnnnnnnnnnnnnnnnnnnnnnnnnnnnnnnnnnnnnnnnnnnnnnnnnnnnnnnnnnnnnnnnnnnnnnnnnnnnnnnnnnnnnnnnnnnnnnnnnnnnnnnnnnnnnnnnnnnnnnnnnnnnnnnnnnnnnnnnnnnnnnnnnnnnnnnnnnnnnnnnnnnnnnnnnnnnnnnnnnnnnnnnnnnnnnnnnnnnnnnnnnnnnnnnnnnnnnnnnnnnnnnnnnnnnnnnnnnnnnnnnnnnnnnnnnnnnnnnnnnnnnnnnnnnnnnnnnnnnnnnnnnnnnnnnnnnnnnnnnnnnnnnnnnnnnnnnnnnnnnnnnnnnnnnnnnnnnnnnnnnnnnnnnnnnnnnnnnnnnnnnnnnnnnnnnnnnnnnnnnnnnnnnnnnnnnnnnnnnnnnnnnnnnnnnnnnnnnnnnnnnnnnnnnnnnnnnnnnnnnnnnnnnnnnnnnnnnnnnnnnnnnnnnnnnnnnnnnnnnnnnnnnnnnnnnnnnnnnnnnnnnnnnnnnnnnnnnnnnnnnnnnnnnnnnnnnnnnnnnnnnnnnnnnnnnnnnnnnnnnnnnnnnnnnnnnnnnnnnnnnnnnnnnnnnnnnnnnnnnnnnnnnnnnnnnnnnnnnnnnnnnnnnnnnnnnnnnnnnnnnnnnnnnnnnnnnnnnnnnnnnnnnnnnnnnnnnnnnnnnnnnnnnnnnnnnnnnnnnnnnnnnnnnnnnnnnnnnnnnnnnnnnnnnnnnnnnnnnnnnnnnnnnnnnnnnnnnnnnnnnnnnnnnnnnnnnnnnnnnnnnnnnnnnnnnnnnnnnnnnnnnnnnnnnnnnnnnnnnnnnnnnnnnnnnnnnnnnnnnnnnnnnnnnnnnnnnnnnnnnnnnnnnnnnnnnnnnnnnnnnnnnnnnnnnnnnnnnnnnnnnnnnnnnnnnnnnnnnnnnnnnnnnnnnnnnnnnnnnnnnnnnnnnnnnnnnnnnnnnnnnnnnnnnnnnnnnnnnnnnnnnnnnnnnnnnnnnnnnnnnnnnnnnnnnnnnnnnnnnnnnnnnnnnnnnnnnnnnnnnnnnnnnnnnnnnnnnnnnnnnnnnnnnnnnnnnnnnnnnnnnnnnnnnnnnnnnnnnnnnnnnnnnnnnnnnnnnnnnnnnnnnnnnnnnnnnnnnnnnnnnnnnnnnnnnnnnnnnnnnnnnnnnnnnnnnnnnnnnnnnnnnnnnnnnnnnnnnnnnnnnnnnnnnnnnnnnnnnnnnnnnnnnnnnnnnnnnnnnnnnnnnnnnnnnnnnnnnnnnnnnnnnnnnnnnnnnnnnnnnnnnnnnnnnnnnnnnnnnnnnnnnnnnnnnnnnnnnnnnnnnnnnnnnnnnnnnnnnnnnnnnnnnnnnnnnnnnnnnnnnnnnnnnnnnnnnnnnnnnnnnnnnnnnnnnnnnnnnnnnnnnnnnnnnnnnnnnnnnnnnnnnnnnnnnnnnnnnnnnnnnnnnnnnnnnnnnnnnnnnnnnnnnnnnnnnnnnnnnnnnnnnnnnnnnnnnnnnnnnnnnnnnnnnnnnnnnnnnnnnnnnnnnnnncacgaaaccggcggcttcgaagtcatcagcggtggcggttcgggcgtcaagagtcttgggcggcgggggagggaacagggattcgagcagctcccggcaggcggttgcaagggaaagccacgtttccacgtcatcgggccgccatccgccgatttctggccggcgcaggctggccgcatccttctggagtcgcagggccgtggttcggtcattgcccttgagagcttgcgcatccagggcggagactttttcgatgttgggaaacggggcgatgcatccaaggggttccaaaaggttcatttcggcagcttggtaagcataagacgcggcggtttcgtttttatcactctccgcgggcaacaggagtaggttccacttaaccagagacaccctagcgcaggcatcttccgagggaaggtttttccacttggggagcatttcggcgtaacgccgcatttctccggcgcgggcaccagcggaacggcgccccgtttcgtagatgtctttgtagttcggcccgttgatttcggcttcggcttcgggtggtaggcttggctttagctctccagttgcgtaggctacaaacccatcactccctgaattttccatttttctttctccttttgctgagcatttcacgcctccatcgggcatcctcgctgcccgaggcgatcttccgctttttggaattacacgtcaagggattttcggcaacatatgcctcaggaaagcccagtttcatccaacccccccccggaaattttgtgcagcccgatgtgtaggtttgagcggtgacgagcggtagaaagcgttaaaaccgcctaaagcgttgattttaaggggggtctatcagcttcgggagcagggggtccccggttcaaatccgggcaccccgaccagataaaaccttcaaaaaaaagagattttgagacgccccccctgcgtcgggtggtcttgtttttggccacggcaaaaaaggaaaggacctttgggctggttgctgccgttgacttccccgcgcgttgcccagccgggacggcccccttgtcgaggatcgagggctggataaaaaggttgatactttgtgataagtaccgtatcttttatccgtggccgaagaccgctacaagcacgccaaaaggctttttcgcaaacatggcggaaccctgcgcacgggggaggccctggctctgggcatacatccgcgcaccctctacggaatgcgggatgaccagctgctcgaacagctcagccgcggattcttccgcctcgcctcgctgcccgcgctatcccacccggacctcgtggcggcggctctgcgggtgccgcggggcgtggtctgcctcgtctccgccctcgccttccatgatgtcaccagcgaaatcccgcacgaggtccagatcgctctgccggccaagaccaaggcgcccaaggtcgactatccaccgctgagggtgttctggttctcggaggctgccctgtcgatgggcgtggagacggccgtgctcgacggcgtcgaggttcgaattttcaacctccccaagaccgtggtcgattgcttccgtttccgcaacaagctcggcctcgatgttgccgtcgaagcgctcggacaggcgatcacgcgcaagggagtgcggccggccgaggtgctgcgctatggccgggcttgtcgggccgagcgggtcatgctgccgtttcttcaggcgattcactgaaggagaaaccgatccctaacctggtggcctcggtgcggggccggacggatgccagcgtctcggagttggtcggactccaaagggcatgcctccatggatgttcaacaccaggagagaaccgtttctcccctggccccctgtttggccctggtaccccctttcagttcctcctccccccgaacccgcccgccccctaaagtaaacccagaaaaacccccatctccttgtggtaaaattctttagccacttcggaccggccccccggggcgggtggggtggcggggaaggcgttggtactccagggggacggggccttggacgttttcgatctcagggaatccctgatcggggattatcgcttttacgtcgagtcgttcatcaacatccgggacgagcggatcaagcggcatgtggatgcccggctgaaccagggcgacctgtggcccgatccgctgatccagttgaatccgcggttcgaaccggggcggccgatcgacgagttgatcggggaggaactgctccacccgggatgtgacccgatcttccggatcaaggacccggagcggccgggcgatccggggcggccgctgcggctgcacaggcaccaggaagacgcgatccgggcggcgcggcggggggagaactacgtcctgaccaccggtaccgggtcggggaagagcctctcctatatcgtgccgatcgtcgatctggtgctgcgggagggctcggggcgggggatccgggggatcgtggtctacccgatgaacgccctggccaacagccagcgcggggagttggaaaagtttctctgtctggggttcccgcaaggctcaccaccggtgaccttcgcccgctacaccgggcaggagaccgaagccgagcggaaggcgatcctcgaagcgccgccggacatcctgctgaccaactacgtgatgctggagctgatcctgacccgcccggccgaagcgccgctggtccgccacgcccaggggctgcgctttttggtgctggatgaactccacacctaccgcggccgccagggggccgacgtggcgctgctgatccggcgggtgcgggagctgatggcccgcggctcatcgatccagtgcgtcggcacctcggccaccctggccggaggcgggacccccgaggagcagcgccgggaagtggccgacgtggccaccctgctcttcggctgcccggtgaagccggagtgcgtcattggcgaaacgctgcgccgggcgacccgcgaggtcgaccccgacgacccgggggaggtcgaacgcctgcggggcgcgatcggttccagcgggccgatccccaccgactaccccgccttgaccgggcacccgctggtccgctggatcgaaggcgatgacggcagggcggccgagctttcgagactgaccggggaaactggaggggaaggcaggcggcataaggttgggaatccgtttttgagtgctcccccaacgccaaagccggaaacctgacggccatgccattcagagacgacgagcccaagatcgccgccgagcgtgtctacccctatccgttccggacagcccgggtgagaggatacatcacgcaaatcaccgctgtgaacatcgcactccaggaaatatcattcctccaacgtggtgatttcaggcaggacacgtttgaagcggtccttccaccaactgatcgtggttggatgctccgtggacaaattccggcaggtgtggtccccaatacgtcgggcggggtctggtggcgcaggaaatccacagcaacacgtcaaggaggaataccatatgggccttccgatggcacagcgggcttacaacctgcttgaagagaagtggatccctgttctttatggtagcgggaagacggatcgcgtggggatctgccaggcactgacagatgcacgtaaaattcggcagatagccgccagcaatcccatggatcgggtggcgctcctgcgctttctgttggccgtgctcctgtggtgcaaggaggacgcgaagtcttccctcgcagggttggacgaaaagggcaccggaataccggagaattggctggccaagctgaaggaaaacaaggctgcgttcaatctgctgggggaaggaaagaggttctatcaggatctcaatgcggaagagccagatatcggcgcctccaacttgattcacgagttcccttctggttcaaagatagctcactttcgtcacatacgcgacgacagcgacgggctgtgcctgggatgctgcgctctcgcactcgtgcggtggtcggtccttgcgagcgctggaaccgctgggcccggactgagcatgaccgcgagcttgaatggaaacacgcctgcttacacgtttcatgctggacctgacctattcagcactctcagacacgagttgcagcggctgaggcctgtcgagaaagacagccccgtctgggatggcgctgacgaggaaaccccactcggcccattgaaagtctttacctggcgctctagacgcgtccttttggcgccaaaatttgaaagcggagggcgcagtattcgtgaaggccactgctcatattgtggaaaaccgtcagatcgaatcgtatacaccatccgcttccgaccaggttggaagcgtgattcaagcgagccgtggaccgacgatccacatctactcagacttgagctagagaaaaaacagtttgttccctcttggccgaaccccaacgatgccttggaacaccacgcggaaatgtggagtttagtcatgcaggggattctgaaaaagaaaaccgatcagaatggggggaagtacgagacggtcctcgttgcagcggcacaagcgctttataaacatatcgaatcccattttgttttttttgctgccgttgaccaggcccgcgtaagtgccatcctctctgaactcgactgggcacgtcgagcgatatggtccacagcaagtgcgcgcacaggaaaaggaaaggagaaaagaaaagtttggggggaacatccgaaagggcatgtgattgttgagagcgtgcatgggccaaacattttggggcacgagattcgttcgagtttgtgtgcgctcagtgcccaaacccatggcgagatggagaattgcttcagggaattgctgcggcaatacgacatcaagacgtggagacaaacggcaaaggcggtaatcacccgggccattgaacaagccgtttgttccactactgccggctcgccactgcgacggcgggaggctttggcacgcgcaaactcggctctggaggacgcgctaattctgacagataaaggttacgcgtttcaagagccagccgcgcctgacaaaccaaaacagggccgaaagaagggggctcggaatgaacgagaccgctgactttatcaggaggctttccaacttgcaggaaggcgagcgctcgcggctgcgccggctggccggacagcctctcgatgcaacgctccagggttttgacctcttcacgggcctctggtggccactgcggaagaaaagtgcgagggccccgcgccgggagccgtcatggctcgttgccaaacttttcggtgcattccgcgtcccgcacatccggcccgattcagactcgcggaacgctttgcccgaggtcctaggcatctgcgaaccgtacgacaaggatggtcgcaagcgcttccgaactcgattcgacgcactgctttgctcgtccctgtcgtctctggaaccccatctgcgttgggctttgggcgaaatagcccgggtcgtcgcggggcaagtggcgcaggggggagatctgaagggcattaactgggtgcaactcctcgacgatctctccatctgggaccggggcgaggagcaccggcatcgacgcgatgttcgcgacgtctgggccgagaaatatctcaacgctgccaattcaaaagagaggagagaaaagaaatgttgattgaaatccacatgattcaaaatcacagcccggccaacctgaaccgagacgatcttggcgcgcccaagacctgcatcttcggcggtgtcacccgggcgcgcatctccagccagtgtctcaaacgtagcatccggcgcagcaaggagttttctgctgcgatggagaacgatggcggggtgcgtactcggcggctgatcgagctgatcgcagagaaggcggcgggcaatgacaataagctgaaacaagaacatgaagagaccatccggaaggtcttttcagatgggggaatcagcttgaaggatgacaaaactttcgacatcctcttcttcctgcctcaatccgccatcaacgaaatgggtgctgccgtgcgcgacggatgcgacggcctgggcaagaaattcgccacaatcatcggcaattttgtcaagactccagacatcgcactttttggccgtatgacagagttcgatgccaagggcgcttttcaaggcctgaagggaaagttttcggttgacgctgcgttatccgcggcacacgccatctcgactcatgctgttgtgaacgaggtagattacttcaccgctaccgatgacgtgtccggccaggacgtcggcgcggcccacatcaacgaggccatgttcaactcggcctgcttctacaaacacttcgttcttgacctcgagcagttgaagaagaacctgggcgatgaaaaactcgcctacaagacagtcgaatgcttccttcaagcagccgccatggccaatccatccggcaaacagcacgcattcgctgctttcaatccgcccgacggagtcctggtcgaggtcaaaaccaagtcggccacgccagtcagctatgccaacgctttcgctgatccagtgccggaaaagtccgaacgcggtttgatcggcgaaagcatcgctagactcggccagtacgcccacgaacttgctttaggttacggcatcgaggccgaacgtttttggttctcgccgaaaacgagccatcaatttgtcgggggcgacggggaaaggaagggatccgaacagggaaattccggtttcggttacaccaagtacgaaaagttcaatgatctcatcaaaaaggtcatgaataaggtaaccccatccaaagcgggagcggaggcggccgaatgaccgaaaccaacacacttttcctccgccttgaaggccccctccaagcttggggtgacacctcaaagttcgtcattcggcggaccatggatgcgccgaccaagtccggcgtggtgggcctggtctgctgcgccatgggcctttcgcggcagacggcgcgggaccgcctgcgggaattgaacgggctcgtgatgggcgtccgcatcgaccggtacggcacgcggtggtgggattaccacacggttggcgcgggaatcggcatgacaaccgctggtggcgaactgaagactggcgccccgggcacgctcatcacgcgccgggagtaccttgccgacgctagctttcttgtggcgctccagggtgatgagaaaatgattcgggaaatcgaggaggcggttacttcaccgaagtggcccgtttttctgggccgcaaatcctgcccgccatccgtcccggtgtttgcaaggccccgcgatggtgagttgtgggcgaatccagccgtccatgacgatctggaggccgcgctatgttccataccgtggtgtccgcggtacaaagacgacgcgacaccgcccaacgggacagtggaagtgctcgtggaatggcggcccgcctcggaaggtgacgtcgcgcccgaagacgccgaagtgtggtatgacgtgccggtttgcttcgatccaccggttcacgagccgcgatttgtccttcggggcgccgtttcggcgtcgttcggcggggcgctccaaaggtgtttcccccccatgaggcgtccgcgcgccgactatcagaacgcgaaatttcgggagcgccgcaaaaagcgaatcaaagccgacgccaggttgtgcgtcttctgcaaattgcccggccggcgcatgactgtccaccacgtcacctaccgaggggccgggggcgatgaaatccgggaggacctgcgttcgctttgcgggctgtgccacgacgccgtcaccatgctcgaatatggcctgggcatggggctggaccgcattaacccagaggagccccgctggcgcgtcccgatcattcaaaagcgggccgagattcttagattccgttcgctggagacccgacgccggcgtcttgccgcggaggaggtggaatagccatgtactggtcctgccttttgatcgacgtaggcgacaaccccgaccggcctcggcctgggcggttttggctaaggaaccgctatcatgttcatcagcggctttgcatggcctttccgtccgatccgcggagaaagcgcgatccagaattcctggcacctttcgattcgatggattttcctgagcaacgacatttagccgacaaaaaggagcacgaagttggcctagataccttgaaacaagtccactctccgcgccaaaaagaaactgggtttctatttcgcatcgaccctctccccaacgggcgggcgatggttcttgtgcagtctggggtgaagccgaactgggaatacgccttccacaacgcaattttcctgctggcagcgcctcctcaaaaacctgcccatttaagggtaaccgtcaagcctggcgagcgatttggctttttgctggtggccaacccgactaagaaaattctgacgattccgaaaaagcagtgggacgccaagtccaaagaggaacagaacgaaaacaaaacgcggcacggaaagcgagtccccgtcccggaagaccagcttattgactggctgaattgccgcgcccaatcggccggattttcccttgacaaggatgcaaccgttgttcaaccgggttacgcatatttcaacaaggacggtgaaggcccatggaagcgccttcgctcagcgcgttacaaggggattctcacagtggaagacgcggtacgcttcaaggaagctctgatccgcggcatcggctcagccaaagccttcggattcggcctgctttcgatctccccggccaatactgccggcccgggcgaggcgaaatgagagtccaggacctgcaccttctgcccaagttcagcgacggctggagctacctttacgtcgagcattgccgtatcgatcaggaagcccgggccattgccattcacgatgaatccggcaaggtgcctgtcccctgcgccaatctggcgctgctgatgcttggccccggcgtttccatcacccatgccgctatttctgtgctggcggaccatggttgcctggtggcttggtccggcgaagagggagttcggttctacgcggtgggcatgggcgagacgcggagcgcagcgaacttcctgcatcaggcgcgggcttgggcggatgcggaccttcgcttgaaggtcgtgcaccgattgtaccagttgcggtttgccgagacgttcgatcctgctctgaccctgcagcagatccgcgggatggaaggggttcgtgtccgggaggcttatgcccgggccgcccgggaaaccggggtgccgtggtcgggccgcagctaccggcgtgacaagtggaccgatgcggacccggtgaacagagccttgtcggcggcaaattcgtgtctttacggcatctgccacgcggctattacctcggcgggattctcgccagcgctcggtttcatccacaccggaaagatgctgtccttcgtttttgacgtcgccgatctctacaaggcggaaatcaccattccagcggcctttcgggcagcggcggaagagaaagacgggcttgaaagacgtgtaaggatctcgtgccgcgacctgtttatgtcaaccaggcttctggagagaattattccggacattcagaaagcgctgatgttgccaaagaacggggcgaccagtgatggtgcattcgaccaggatgccgccgccccgggctctttgtgggaccccgtcacgggaaaagtagagggcgggtgtgcctatccgttggaagctgacgtaacggaggctgacgatggtggttctgatccttgagcgtgtgccgccggggttacggggtgaattgacacggtggtttctggaaccgaaagcaggagtgtttgctgggagggtttcagccatggtgcgcgataaactctgggaaaaagcctgcgcgcaagccaggggaggtggttgtgtgatgatgtattcgagcgacaacgagcaaggttttcggattcggagctggggagaaacggggcgctcggtcgaagacttcgagggcctttttctcgttagggtaccgtaaatgccggttttttcagtattgtccccacgcgcgtgggggtgaaccgcccaccccgcctagcctcgcgctcgtcaagggattgtccccacgcgcgtgggggtgaaccgccgcggaacgggccggaatccaggtgcccgacattgtccccacgcgcgtgggggtgaaccgaagggcaaggcgaagggtagaccgatgagcgaattgtccccacgcgcgtgggggtgaaccgagacgattcccgagccagagacggggccggtcattgtccccacgcgcgtgggggtgaaccgtccccagtcggggatccgaccttcttgaggtaattgtccccacgcgcgtgggggtgaaccggcgtaccaaaaaaacccctggctagacattcaattgtccccacgcgcgtgggggtgaaccggtccagtattcggataacggctcatcttggacattgtccccacgcgcgtgggggtgaaccgacgttgttaaatctttccagacattatgttcgattgtccccacgcgcgtgggggtgaaccgggtatgaaggtagatgatatagagggaggtgaattgtccccacgcgcgtgggggtgaaccgtctttgccactatgcaagccggtctgagttcgattgtccccacgcgcgtgggggtgaaccgatctcccgagagttggatggagacatgtgcctattgtccccacgcgcgtgggggtgaaccgatcgaattgaccttcgcctcccattggaacccattgtccccacgcgcgtgggggtgaaccgtccctggcaacaccgtacacaccacagccacaattgtccccacgcgcgtgggggtgaaccggcgtcaggatgtgtttgctgatccactgggccattgtccccacgcgcgtgggggtgaaccgacttgaaggcaagaggcttggactctccggacattgtccccacgcgcgtgggggtgaaccggccttcacgctgcttgctcaaggggaagttctattgtccccacgcgcgtgggggtgaaccgtcaacgaagccagggacgtgttcacagatctgattgtccccacgcgcgtgggggtgaaccgctgagcgttccgtcctcgttctggtcgctggcattgtccccacgcgcgtgggggtgaaccgaagtagaagggcacgattcgccggaagtggggattgtccccacgcgcgtgggggtgaaccggactcggagaactcgccgcgcgcgctcttcttattgtccccacgcgcgtgggggtgaaccggtcgctgttgccagcggtcacggaatcgggaaattgtccccacgcgcgtgggggtgaaccgtaagccggtttggttcttgccgctaccatcctattgtccccacgcgcgtgggggtgaaccgtgacttcgggtgaggaggtgggaatgaactgcattgtccccacgcgcgtgggggtgaaccgcaatggggcgcccaaagaaggacagcgggaaaattgtccccacgcgcgtgggggtgaaccgacaccagtgttatgtggctcttctctcgcctcattgtccccacgcgcgtgggggtgaaccggattgcgcatccacgaggccgttatcctttccattgtccccacgcgcgtggggacaatggaa

SEQ ID NO: 1025 - DNA, 109357 bp, Artificial Sequence
  Synthetic Oligonucleotide
  misc_feature (1)..(97781): n is a, c, g, or t
nnnnnnnnnnnnnnnnnnnnnnnnnnnnnnnnnnnnnnnnnnnnnnnnnnnnnnnnnnnnnnnnnnnnnnnnnnnnnnnnnnnnnnnnnnnnnnnnnnnnnnnnnnnnnnnnnnnnnnnnnnnnnnnnnnnnnnnnnnnnnnnnnnnnnnnnnnnnnnnnnnnnnnnnnnnnnnnnnnnnnnnnnnnnnnnnnnnnnnnnnnnnnnnnnnnnnnnnnnnnnnnnnnnnnnnnnnnnnnnnnnnnnnnnnnnnnnnnnnnnnnnnnnnnnnnnnnnnnnnnnnnnnnnnnnnnnnnnnnnnnnnnnnnnnnnnnnnnnnnnnnnnnnnnnnnnnnnnnnnnnnnnnnnnnnnnnnnnnnnnnnnnnnnnnnnnnnnnnnnnnnnnnnnnnnnnnnnnnnnnnnnnnnnnnnnnnnnnnnnnnnnnnnnnnnnnnnnnnnnnnnnnnnnnnnnnnnnnnnnnnnnnnnnnnnnnnnnnnnnnnnnnnnnnnnnnnnnnnnnnnnnnnnnnnnnnnnnnnnnnnnnnnnnnnnnnnnnnnnnnnnnnnnnnnnnnnnnnnnnnnnnnnnnnnnnnnnnnnnnnnnnnnnnnnnnnnnnnnnnnnnnnnnnnnnnnnnnnnnnnnnnnnnnnnnnnnnnnnnnnnnnnnnnnnnnnnnnnnnnnnnnnnnnnnnnnnnnnnnnnnnnnnnnnnnnnnnnnnnnnnnnnnnnnnnnnnnnnnnnnnnnnnnnnnnnnnnnnnnnnnnnnnnnnnnnnnnnnnnnnnnnnnnnnnnnnnnnnnnnnnnnnnnnnnnnnnnnnnnnnnnnnnnnnnnnnnnnnnnnnnnnnnnnnnnnnnnnnnnnnnnnnnnnnnnnnnnnnnnnnnnnnnnnnnnnnnnnnnnnnnnnnnnnnnnnnnnnnnnnnnnnnnnnnnnnnnnnnnnnnnnnnnnnnnnnnnnnnnnnnnnnnnnnnnnnnnnnnnnnnnnnnnnnnnnnnnnnnnnnnnnnnnnnnnnnnnnnnnnnnnnnnnnnnnnnnnnnnnnnnnnnnnnnnnnnnnnnnnnnnnnnnnnnnnnnnnnnnnnnnnnnnnnnnnnnnnnnnnnnnnnnnnnnnnnnnnnnnnnnnnnnnnnnnnnnnnnnnnnnnnnnnnnnnnnnnnnnnnnnnnnnnnnnnnnnnnnnnnnnnnnnnnnnnnnnnnnnnnnnnnnnnnnnnnnnnnnnnnnnnnnnnnnnnnnnnnnnnnnnnnnnnnnnnnnnnnnnnnnnnnnnnnnnnnnnnnnnnnnnnnnnnnnnnnnnnnnnnnnnnnnnnnnnnnnnnnnnnnnnnnnnnnnnnnnnnnnnnnnnnnnnnnnnnnnnnnnnnnnnnnnnnnnnnnnnnnnnnnnnnnnnnnnnnnnnnnnnnnnnnnnnnnnnnnnnnnnnnnnnnnnnnnnnnnnnnnnnnnnnnnnnnnnnnnnnnnnnnnnnnnnnnnnnnnnnnnnnnnnnnnnnnnnnnnnnnnnnnnnnnnnnnnnnnnnnnnnnnnnnnnnnnnnnnnnnnnnnnnnnnnnnnnnnnnnnnnnnnnnnnnnnnnnnnnnnnnnnnnnnnnnnnnnnnnnnnnnnnnnnnnnnnnnnnnnnnnnnnnnnnnnnnnnnnnnnnnnnnnnnnnnnnnnnnnnnnnnnnnnnnnnnnnnnnnnnnnnnnnnnnnnnnnnnnnnnnnnnnnnnnnnnnnnnnnnnnnnnnnnnnnnnnnnnnnnnnnnnnnnnnnnnnnnnnnnnnnnnnnnnnnnnnnnnnnnnnnnnnnnnnnnnnnnnnnnnnnnnnnnnnnnnnnnnnnnnnnnnnnnnnnnnnnnnnnnnnnnnnnnnnnnnnnnnnnnnnnnnnnnnnnnnnnnnnnnnnnnnnnnnnnnnnnnnnnnnnnnnnnnnnnnnnnnnnnnnnnnnnnnnnnnnnnnnnnnnnnnnnnnnnnnnnnnnnnnnnnnnnnnnnnnnnnnnnnnnnnnnnnnnnnnnnnnnnnnnnnnnnnnnnnnnnnnnnnnnnnnnnnnnnnnnnnnnnnnnnnnnnnnnnnnnnnnnnnnnnnnnnnnnnnnnnnnnnnnnnnnnnnnnnnnnnnnnnnnnnnnnnnnnnnnnnnnnnnnnnnnnnnnnnnnnnnnnnnnnnnnnnnnnnnnnnnnnnnnnnnnnnnnnnnnnnnnnnnnnnnnnnnnnnnnnnnnnnnnnnnnnnnnnnnnnnnnnnnnnnnnnnnnnnnnnnnnnnnnnnnnnnnnnnnnnnnnnnnnnnnnnnnnnnnnnnnnnnnnnnnnnnnnnnnnnnnnnnnnnnnnnnnnnnnnnnnnnnnnnnnnnnnnnnnnnnnnnnnnnnnnnnnnnnnnnnnnnnnnnnnnnnnnnnnnnnnnnnnnnnnnnnnnnnnnnnnnnnnnnnnnnnnnnnnnnnnnnnnnnnnnnnnnnnnnnnnnnnnnnnnnnnnnnnnnnnnnnnnnnnnnnnnnnnnnnnnnnnnnnnnnnnnnnnnnnnnnnnnnnnnnnnnnnnnnnnnnnnnnnnnnnnnnnnnnnnnnnnnnnnnnnnnnnnnnnnnnnnnnnnnnnnnnnnnnnnnnnnnnnnnnnnnnnnnnnnnnnnnnnnnnnnnnnnnnnnnnnnnnnnnnnnnnnnnnnnnnnnnnnnnnnnnnnnnnnnnnnnnnnnnnnnnnnnnnnnnnnnnnnnnnnnnnnnnnnnnnnnnnnnnnnnnnnnnnnnnnnnnnnnnnnnnnnnnnnnnnnnnnnnnnnnnnnnnnnnnnnnnnnnnnnnnnnnnnnnnnnnnnnnnnnnnnnnnnnnnnnnnnnnnnnnnnnnnnnnnnnnnnnnnnnnnnnnnnnnnnnnnnnnnnnnnnnnnnnnnnnnnnnnnnnnnnnnnnnnnnnnnnnnnnnnnnnnnnnnnnnnnnnnnnnnnnnnnnnnnnnnnnnnnnnnnnnnnnnnnnnnnnnnnnnnnnnnnnnnnnnnnnnnnnnnnnnnnnnnnnnnnnnnnnnnnnnnnnnnnnnnnnnnnnnnnnnnnnnnnnnnnnnnnnnnnnnnnnnnnnnnnnnnnnnnnnnnnnnnnnnnnnnnnnnnnnnnnnnnnnnnnnnnnnnnnnnnnnnnnnnnnnnnnnnnnnnnnnnnnnnnnnnnnnnnnnnnnnnnnnnnnnnnnnnnnnnnnnnnnnnnnnnnnnnnnnnnnnnnnnnnnnnnnnnnnnnnnnnnnnnnnnnnnnnnnnnnnnnnnnnnnnnnnnnnnnnnnnnnnnnnnnnnnnnnnnnnnnnnnnnnnnnnnnnnnnnnnnnnnnnnnnnnnnnnnnnnnnnnnnnnnnnnnnnnnnnnnnnnnnnnnnnnnnnnnnnnnnnnnnnnnnnnnnnnnnnnnnnnnnnnnnnnnnnnnnnnnnnnnnnnnnnnnnnnnnnnnnnnnnnnnnnnnnnnnnnnnnnnnnnnnnnnnnnnnnnnnnnnnnnnnnnnnnnnnnnnnnnnnnnnnnnnnnnnnnnnnnnnnnnnnnnnnnnnnnnnnnnnnnnnnnnnnnnnnnnnnnnnnnnnnnnnnnnnnnnnnnnnnnnnnnnnnnnnnnnnnnnnnnnnnnnnnnnnnnnnnnnnnnnnnnnnnnnnnnnnnnnnnnnnnnnnnnnnnnnnnnnnnnnnnnnnnnnnnnnnnnnnnnnnnnnnnnnnnnnnnnnnnnnnnnnnnnnnnnnnnnnnnnnnnnnnnnnnnnnnnnnnnnnnnnnnnnnnnnnnnnnnnnnnnnnnnnnnnnnnnnnnnnnnnnnnnnnnnnnnnnnnnnnnnnnnnnnnnnnnnnnnnnnnnnnnnnnnnnnnnnnnnnnnnnnnnnnnnnnnnnnnnnnnnnnnnnnnnnnnnnnnnnnnnnnnnnnnnnnnnnnnnnnnnnnnnnnnnnnnnnnnnnnnnnnnnnnnnnnnnnnnnnnnnnnnnnnnnnnnnnnnnnnnnnnnnnnnnnnnnnnnnnnnnnnnnnnnnnnnnnnnnnnnnnnnnnnnnnnnnnnnnnnnnnnnnnnnnnnnnnnnnnnnnnnnnnnnnnnnnnnnnnnnnnnnnnnnnnnnnnnnnnnnnnnnnnnnnnnnnnnnnnnnnnnnnnnnnnnnnnnnnnnnnnnnnnnnnnnnnnnnnnnnnnnnnnnnnnnnnnnnnnnnnnnnnnnnnnnnnnnnnnnnnnnnnnnnnnnnnnnnnnnnnnnnnnnnnnnnnnnnnnnnnnnnnnnnnnnnnnnnnnnnnnnnnnnnnnnnnnnnnnnnnnnnnnnnnnnnnnnnnnnnnnnnnnnnnnnnnnnnnnnnnnnnnnnnnnnnnnnnnnnnnnnnnnnnnnnnnnnnnnnnnnnnnnnnnnnnnnnnnnnnnnnnnnnnnnnnnnnnnnnnnnnnnnnnnnnnnnnnnnnnnnnnnnnnnnnnnnnnnnnnnnnnnnnnnnnnnnnnnnnnnnnnnnnnnnnnnnnnnnnnnnnnnnnnnnnnnnnnnnnnnnnnnnnnnnnnnnnnnnnnnnnnnnnnnnnnnnnnnnnnnnnnnnnnnnnnnnnnnnnnnnnnnnnnnnnnnnnnnnnnnnnnnnnnnnnnnnnnnnnnnnnnnnnnnnnnnnnnnnnnnnnnnnnnnnnnnnnnnnnnnnnnnnnnnnnnnnnnnnnnnnnnnnnnnnnnnnnnnnnnnnnnnnnnnnnnnnnnnnnnnnnnnnnnnnnnnnnnnnnnnnnnnnnnnnnnnnnnnnnnnnnnnnnnnnnnnnnnnnnnnnnnnnnnnnnnnnnnnnnnnnnnnnnnnnnnnnnnnnnnnnnnnnnnnnnnnnnnnnnnnnnnnnnnnnnnnnnnnnnnnnnnnnnnnnnnnnnnnnnnnnnnnnnnnnnnnnnnnnnnnnnnnnnnnnnnnnnnnnnnnnnnnnnnnnnnnnnnnnnnnnnnnnnnnnnnnnnnnnnnnnnnnnnnnnnnnnnnnnnnnnnnnnnnnnnnnnnnnnnnnnnnnnnnnnnnnnnnnnnnnnnnnnnnnnnnnnnnnnnnnnnnnnnnnnnnnnnnnnnnnnnnnnnnnnnnnnnnnnnnnnnnnnnnnnnnnnnnnnnnnnnnnnnnnnnnnnnnnnnnnnnnnnnnnnnnnnnnnnnnnnnnnnnnnnnnnnnnnnnnnnnnnnnnnnnnnnnnnnnnnnnnnnnnnnnnnnnnnnnnnnnnnnnnnnnnnnnnnnnnnnnnnnnnnnnnnnnnnnnnnnnnnnnnnnnnnnnnnnnnnnnnnnnnnnnnnnnnnnnnnnnnnnnnnnnnnnnnnnnnnnnnnnnnnnnnnnnnnnnnnnnnnnnnnnnnnnnnnnnnnnnnnnnnnnnnnnnnnnnnnnnnnnnnnnnnnnnnnnnnnnnnnnnnnnnnnnnnnnnnnnnnnnnnnnnnnnnnnnnnnnnnnnnnnnnnnnnnnnnnnnnnnnnnnnnnnnnnnnnnnnnnnnnnnnnnnnnnnnnnnnnnnnnnnnnnnnnnnnnnnnnnnnnnnnnnnnnnnnnnnnnnnnnnnnnnnnnnnnnnnnnnnnnnnnnnnnnnnnnnnnnnnnnnnnnnnnnnnnnnnnnnnnnnnnnnnnnnnnnnnnnnnnnnnnnnnnnnnnnnnnnnnnnnnnnnnnnnnnnnnnnnnnnnnnnnnnnnnnnnnnnnnnnnnnnnnnnnnnnnnnnnnnnnnnnnnnnnnnnnnnnnnnnnnnnnnnnnnnnnnnnnnnnnnnnnnnnnnnnnnnnnnnnnnnnnnnnnnnnnnnnnnnnnnnnnnnnnnnnnnnnnnnnnnnnnnnnnnnnnnnnnnnnnnnnnnnnnnnnnnnnnnnnnnnnnnnnnnnnnnnnnnnnnnnnnnnnnnnnnnnnnnnnnnnnnnnnnnnnnnnnnnnnnnnnnnnnnnnnnnnnnnnnnnnnnnnnnnnnnnnnnnnnnnnnnnnnnnnnnnnnnnnnnnnnnnnnnnnnnnnnnnnnnnnnnnnnnnnnnnnnnnnnnnnnnnnnnnnnnnnnnnnnnnnnnnnnnnnnnnnnnnnnnnnnnnnnnnnnnnnnnnnnnnnnnnnnnnnnnnnnnnnnnnnnnnnnnnnnnnnnnnnnnnnnnnnnnnnnnnnnnnnnnnnnnnnnnnnnnnnnnnnnnnnnnnnnnnnnnnnnnnnnnnnnnnnnnnnnnnnnnnnnnnnnnnnnnnnnnnnnnnnnnnnnnnnnnnnnnnnnnnnnnnnnnnnnnnnnnnnnnnnnnnnnnnnnnnnnnnnnnnnnnnnnnnnnnnnnnnnnnnnnnnnnnnnnnnnnnnnnnnnnnnnnnnnnnnnnnnnnnnnnnnnnnnnnnnnnnnnnnnnnnnnnnnnnnnnnnnnnnnnnnnnnnnnnnnnnnnnnnnnnnnnnnnnnnnnnnnnnnnnnnnnnnnnnnnnnnnnnnnnnnnnnnnnnnnnnnnnnnnnnnnnnnnnnnnnnnnnnnnnnnnnnnnnnnnnnnnnnnnnnnnnnnnnnnnnnnnnnnnnnnnnnnnnnnnnnnnnnnnnnnnnnnnnnnnnnnnnnnnnnnnnnnnnnnnnnnnnnnnnnnnnnnnnnnnnnnnnnnnnnnnnnnnnnnnnnnnnnnnnnnnnnnnnnnnnnnnnnnnnnnnnnnnnnnnnnnnnnnnnnnnnnnnnnnnnnnnnnnnnnnnnnnnnnnnnnnnnnnnnnnnnnnnnnnnnnnnnnnnnnnnnnnnnnnnnnnnnnnnnnnnnnnnnnnnnnnnnnnnnnnnnnnnnnnnnnnnnnnnnnnnnnnnnnnnnnnnnnnnnnnnnnnnnnnnnnnnnnnnnnnnnnnnnnnnnnnnnnnnnnnnnnnnnnnnnnnnnnnnnnnnnnnnnnnnnnnnnnnnnnnnnnnnnnnnnnnnnnnnnnnnnnnnnnnnnnnnnnnnnnnnnnnnnnnnnnnnnnnnnnnnnnnnnnnnnnnnnnnnnnnnnnnnnnnnnnnnnnnnnnnnnnnnnnnnnnnnnnnnnnnnnnnnnnnnnnnnnnnnnnnnnnnnnnnnnnnnnnnnnnnnnnnnnnnnnnnnnnnnnnnnnnnnnnnnnnnnnnnnnnnnnnnnnnnnnnnnnnnnnnnnnnnnnnnnnnnnnnnnnnnnnnnnnnnnnnnnnnnnnnnnnnnnnnnnnnnnnnnnnnnnnnnnnnnnnnnnnnnnnnnnnnnnnnnnnnnnnnnnnnnnnnnnnnnnnnnnnnnnnnnnnnnnnnnnnnnnnnnnnnnnnnnnnnnnnnnnnnnnnnnnnnnnnnnnnnnnnnnnnnnnnnnnnnnnnnnnnnnnnnnnnnnnnnnnnnnnnnnnnnnnnnnnnnnnnnnnnnnnnnnnnnnnnnnnnnnnnnnnnnnnnnnnnnnnnnnnnnnnnnnnnnnnnnnnnnnnnnnnnnnnnnnnnnnnnnnnnnnnnnnnnnnnnnnnnnnnnnnnnnnnnnnnnnnnnnnnnnnnnnnnnnnnnnnnnnnnnnnnnnnnnnnnnnnnnnnnnnnnnnnnnnnnnnnnnnnnnnnnnnnnnnnnnnnnnnnnnnnnnnnnnnnnnnnnnnnnnnnnnnnnnnnnnnnnnnnnnnnnnnnnnnnnnnnnnnnnnnnnnnnnnnnnnnnnnnnnnnnnnnnnnnnnnnnnnnnnnnnnnnnnnnnnnnnnnnnnnnnnnnnnnnnnnnnnnnnnnnnnnnnnnnnnnnnnnnnnnnnnnnnnnnnnnnnnnnnnnnnnnnnnnnnnnnnnnnnnnnnnnnnnnnnnnnnnnnnnnnnnnnnnnnnnnnnnnnnnnnnnnnnnnnnnnnnnnnnnnnnnnnnnnnnnnnnnnnnnnnnnnnnnnnnnnnnnnnnnnnnnnnnnnnnnnnnnnnnnnnnnnnnnnnnnnnnnnnnnnnnnnnnnnnnnnnnnnnnnnnnnnnnnnnnnnnnnnnnnnnnnnnnnnnnnnnnnnnnnnnnnnnnnnnnnnnnnnnnnnnnnnnnnnnnnnnnnnnnnnnnnnnnnnnnnnnnnnnnnnnnnnnnnnnnnnnnnnnnnnnnnnnnnnnnnnnnnnnnnnnnnnnnnnnnnnnnnnnnnnnnnnnnnnnnnnnnnnnnnnnnnnnnnnnnnnnnnnnnnnnnnnnnnnnnnnnnnnnnnnnnnnnnnnnnnnnnnnnnnnnnnnnnnnnnnnnnnnnnnnnnnnnnnnnnnnnnnnnnnnnnnnnnnnnnnnnnnnnnnnnnnnnnnnnnnnnnnnnnnnnnnnnnnnnnnnnnnnnnnnnnnnnnnnnnnnnnnnnnnnnnnnnnnnnnnnnnnnnnnnnnnnnnnnnnnnnnnnnnnnnnnnnnnnnnnnnnnnnnnnnnnnnnnnnnnnnnnnnnnnnnnnnnnnnnnnnnnnnnnnnnnnnnnnnnnnnnnnnnnnnnnnnnnnnnnnnnnnnnnnnnnnnnnnnnnnnnnnnnnnnnnnnnnnnnnnnnnnnnnnnnnnnnnnnnnnnnnnnnnnnnnnnnnnnnnnnnnnnnnnnnnnnnnnnnnnnnnnnnnnnnnnnnnnnnnnnnnnnnnnnnnnnnnnnnnnnnnnnnnnnnnnnnnnnnnnnnnnnnnnnnnnnnnnnnnnnnnnnnnnnnnnnnnnnnnnnnnnnnnnnnnnnnnnnnnnnnnnnnnnnnnnnnnnnnnnnnnnnnnnnnnnnnnnnnnnnnnnnnnnnnnnnnnnnnnnnnnnnnnnnnnnnnnnnnnnnnnnnnnnnnnnnnnnnnnnnnnnnnnnnnnnnnnnnnnnnnnnnnnnnnnnnnnnnnnnnnnnnnnnnnnnnnnnnnnnnnnnnnnnnnnnnnnnnnnnnnnnnnnnnnnnnnnnnnnnnnnnnnnnnnnnnnnnnnnnnnnnnnnnnnnnnnnnnnnnnnnnnnnnnnnnnnnnnnnnnnnnnnnnnnnnnnnnnnnnnnnnnnnnnnnnnnnnnnnnnnnnnnnnnnnnnnnnnnnnnnnnnnnnnnnnnnnnnnnnnnnnnnnnnnnnnnnnnnnnnnnnnnnnnnnnnnnnnnnnnnnnnnnnnnnnnnnnnnnnnnnnnnnnnnnnnnnnnnnnnnnnnnnnnnnnnnnnnnnnnnnnnnnnnnnnnnnnnnnnnnnnnnnnnnnnnnnnnnnnnnnnnnnnnnnnnnnnnnnnnnnnnnnnnnnnnnnnnnnnnnnnnnnnnnnnnnnnnnnnnnnnnnnnnnnnnnnnnnnnnnnnnnnnnnnnnnnnnnnnnnnnnnnnnnnnnnnnnnnnnnnnnnnnnnnnnnnnnnnnnnnnnnnnnnnnnnnnnnnnnnnnnnnnnnnnnnnnnnnnnnnnnnnnnnnnnnnnnnnnnnnnnnnnnnnnnnnnnnnnnnnnnnnnnnnnnnnnnnnnnnnnnnnnnnnnnnnnnnnnnnnnnnnnnnnnnnnnnnnnnnnnnnnnnnnnnnnnnnnnnnnnnnnnnnnnnnnnnnnnnnnnnnnnnnnnnnnnnnnnnnnnnnnnnnnnnnnnnnnnnnnnnnnnnnnnnnnnnnnnnnnnnnnnnnnnnnnnnnnnnnnnnnnnnnnnnnnnnnnnnnnnnnnnnnnnnnnnnnnnnnnnnnnnnnnnnnnnnnnnnnnnnnnnnnnnnnnnnnnnnnnnnnnnnnnnnnnnnnnnnnnnnnnnnnnnnnnnnnnnnnnnnnnnnnnnnnnnnnnnnnnnnnnnnnnnnnnnnnnnnnnnnnnnnnnnnnnnnnnnnnnnnnnnnnnnnnnnnnnnnnnnnnnnnnnnnnnnnnnnnnnnnnnnnnnnnnnnnnnnnnnnnnnnnnnnnnnnnnnnnnnnnnnnnnnnnnnnnnnnnnnnnnnnnnnnnnnnnnnnnnnnnnnnnnnnnnnnnnnnnnnnnnnnnnnnnnnnnnnnnnnnnnnnnnnnnnnnnnnnnnnnnnnnnnnnnnnnnnnnnnnnnnnnnnnnnnnnnnnnnnnnnnnnnnnnnnnnnnnnnnnnnnnnnnnnnnnnnnnnnnnnnnnnnnnnnnnnnnnnnnnnnnnnnnnnnnnnnnnnnnnnnnnnnnnnnnnnnnnnnnnnnnnnnnnnnnnnnnnnnnnnnnnnnnnnnnnnnnnnnnnnnnnnnnnnnnnnnnnnnnnnnnnnnnnnnnnnnnnnnnnnnnnnnnnnnnnnnnnnnnnnnnnnnnnnnnnnnnnnnnnnnnnnnnnnnnnnnnnnnnnnnnnnnnnnnnnnnnnnnnnnnnnnnnnnnnnnnnnnnnnnnnnnnnnnnnnnnnnnnnnnnnnnnnnnnnnnnnnnnnnnnnnnnnnnnnnnnnnnnnnnnnnnnnnnnnnnnnnnnnnnnnnnnnnnnnnnnnnnnnnnnnnnnnnnnnnnnnnnnnnnnnnnnnnnnnnnnnnnnnnnnnnnnnnnnnnnnnnnnnnnnnnnnnnnnnnnnnnnnnnnnnnnnnnnnnnnnnnnnnnnnnnnnnnnnnnnnnnnnnnnnnnnnnnnnnnnnnnnnnnnnnnnnnnnnnnnnnnnnnnnnnnnnnnnnnnnnnnnnnnnnnnnnnnnnnnnnnnnnnnnnnnnnnnnnnnnnnnnnnnnnnnnnnnnnnnnnnnnnnnnnnnnnnnnnnnnnnnnnnnnnnnnnnnnnnnnnnnnnnnnnnnnnnnnnnnnnnnnnnnnnnnnnnnnnnnnnnnnnnnnnnnnnnnnnnnnnnnnnnnnnnnnnnnnnnnnnnnnnnnnnnnnnnnnnnnnnnnnnnnnnnnnnnnnnnnnnnnnnnnnnnnnnnnnnnnnnnnnnnnnnnnnnnnnnnnnnnnnnnnnnnnnnnnnnnnnnnnnnnnnnnnnnnnnnnnnnnnnnnnnnnnnnnnnnnnnnnnnnnnnnnnnnnnnnnnnnnnnnnnnnnnnnnnnnnnnnnnnnnnnnnnnnnnnnnnnnnnnnnnnnnnnnnnnnnnnnnnnnnnnnnnnnnnnnnnnnnnnnnnnnnnnnnnnnnnnnnnnnnnnnnnnnnnnnnnnnnnnnnnnnnnnnnnnnnnnnnnnnnnnnnnnnnnnnnnnnnnnnnnnnnnnnnnnnnnnnnnnnnnnnnnnnnnnnnnnnnnnnnnnnnnnnnnnnnnnnnnnnnnnnnnnnnnnnnnnnnnnnnnnnnnnnnnnnnnnnnnnnnnnnnnnnnnnnnnnnnnnnnnnnnnnnnnnnnnnnnnnnnnnnnnnnnnnnnnnnnnnnnnnnnnnnnnnnnnnnnnnnnnnnnnnnnnnnnnnnnnnnnnnnnnnnnnnnnnnnnnnnnnnnnnnnnnnnnnnnnnnnnnnnnnnnnnnnnnnnnnnnnnnnnnnnnnnnnnnnnnnnnnnnnnnnnnnnnnnnnnnnnnnnnnnnnnnnnnnnnnnnnnnnnnnnnnnnnnnnnnnnnnnnnnnnnnnnnnnnnnnnnnnnnnnnnnnnnnnnnnnnnnnnnnnnnnnnnnnnnnnnnnnnnnnnnnnnnnnnnnnnnnnnnnnnnnnnnnnnnnnnnnnnnnnnnnnnnnnnnnnnnnnnnnnnnnnnnnnnnnnnnnnnnnnnnnnnnnnnnnnnnnnnnnnnnnnnnnnnnnnnnnnnnnnnnnnnnnnnnnnnnnnnnnnnnnnnnnnnnnnnnnnnnnnnnnnnnnnnnnnnnnnnnnnnnnnnnnnnnnnnnnnnnnnnnnnnnnnnnnnnnnnnnnnnnnnnnnnnnnnnnnnnnnnnnnnnnnnnnnnnnnnnnnnnnnnnnnnnnnnnnnnnnnnnnnnnnnnnnnnnnnnnnnnnnnnnnnnnnnnnnnnnnnnnnnnnnnnnnnnnnnnnnnnnnnnnnnnnnnnnnnnnnnnnnnnnnnnnnnnnnnnnnnnnnnnnnnnnnnnnnnnnnnnnnnnnnnnnnnnnnnnnnnnnnnnnnnnnnnnnnnnnnnnnnnnnnnnnnnnnnnnnnnnnnnnnnnnnnnnnnnnnnnnnnnnnnnnnnnnnnnnnnnnnnnnnnnnnnnnnnnnnnnnnnnnnnnnnnnnnnnnnnnnnnnnnnnnnnnnnnnnnnnnnnnnnnnnnnnnnnnnnnnnnnnnnnnnnnnnnnnnnnnnnnnnnnnnnnnnnnnnnnnnnnnnnnnnnnnnnnnnnnnnnnnnnnnnnnnnnnnnnnnnnnnnnnnnnnnnnnnnnnnnnnnnnnnnnnnnnnnnnnnnnnnnnnnnnnnnnnnnnnnnnnnnnnnnnnnnnnnnnnnnnnnnnnnnnnnnnnnnnnnnnnnnnnnnnnnnnnnnnnnnnnnnnnnnnnnnnnnnnnnnnnnnnnnnnnnnnnnnnnnnnnnnnnnnnnnnnnnnnnnnnnnnnnnnnnnnnnnnnnnnnnnnnnnnnnnnnnnnnnnnnnnnnnnnnnnnnnnnnnnnnnnnnnnnnnnnnnnnnnnnnnnnnnnnnnnnnnnnnnnnnnnnnnnnnnnnnnnnnnnnnnnnnnnnnnnnnnnnnnnnnnnnnnnnnnnnnnnnnnnnnnnnnnnnnnnnnnnnnnnnnnnnnnnnnnnnnnnnnnnnnnnnnnnnnnnnnnnnnnnnnnnnnnnnnnnnnnnnnnnnnnnnnnnnnnnnnnnnnnnnnnnnnnnnnnnnnnnnnnnnnnnnnnnnnnnnnnnnnnnnnnnnnnnnnnnnnnnnnnnnnnnnnnnnnnnnnnnnnnnnnnnnnnnnnnnnnnnnnnnnnnnnnnnnnnnnnnnnnnnnnnnnnnnnnnnnnnnnnnnnnnnnnnnnnnnnnnnnnnnnnnnnnnnnnnnnnnnnnnnnnnnnnnnnnnnnnnnnnnnnnnnnnnnnnnnnnnnnnnnnnnnnnnnnnnnnnnnnnnnnnnnnnnnnnnnnnnnnnnnnnnnnnnnnnnnnnnnnnnnnnnnnnnnnnnnnnnnnnnnnnnnnnnnnnnnnnnnnnnnnnnnnnnnnnnnnnnnnnnnnnnnnnnnnnnnnnnnnnnnnnnnnnnnnnnnnnnnnnnnnnnnnnnnnnnnnnnnnnnnnnnnnnnnnnnnnnnnnnnnnnnnnnnnnnnnnnnnnnnnnnnnnnnnnnnnnnnnnnnnnnnnnnnnnnnnnnnnnnnnnnnnnnnnnnnnnnnnnnnnnnnnnnnnnnnnnnnnnnnnnnnnnnnnnnnnnnnnnnnnnnnnnnnnnnnnnnnnnnnnnnnnnnnnnnnnnnnnnnnnnnnnnnnnnnnnnnnnnnnnnnnnnnnnnnnnnnnnnnnnnnnnnnnnnnnnnnnnnnnnnnnnnnnnnnnnnnnnnnnnnnnnnnnnnnnnnnnnnnnnnnnnnnnnnnnnnnnnnnnnnnnnnnnnnnnnnnnnnnnnnnnnnnnnnnnnnnnnnnnnnnnnnnnnnnnnnnnnnnnnnnnnnnnnnnnnnnnnnnnnnnnnnnnnnnnnnnnnnnnnnnnnnnnnnnnnnnnnnnnnnnnnnnnnnnnnnnnnnnnnnnnnnnnnnnnnnnnnnnnnnnnnnnnnnnnnnnnnnnnnnnnnnnnnnnnnnnnnnnnnnnnnnnnnnnnnnnnnnnnnnnnnnnnnnnnnnnnnnnnnnnnnnnnnnnnnnnnnnnnnnnnnnnnnnnnnnnnnnnnnnnnnnnnnnnnnnnnnnnnnnnnnnnnnnnnnnnnnnnnnnnnnnnnnnnnnnnnnnnnnnnnnnnnnnnnnnnnnnnnnnnnnnnnnnnnnnnnnnnnnnnnnnnnnnnnnnnnnnnnnnnnnnnnnnnnnnnnnnnnnnnnnnnnnnnnnnnnnnnnnnnnnnnnnnnnnnnnnnnnnnnnnnnnnnnnnnnnnnnnnnnnnnnnnnnnnnnnnnnnnnnnnnnnnnnnnnnnnnnnnnnnnnnnnnnnnnnnnnnnnnnnnnnnnnnnnnnnnnnnnnnnnnnnnnnnnnnnnnnnnnnnnnnnnnnnnnnnnnnnnnnnnnnnnnnnnnnnnnnnnnnnnnnnnnnnnnnnnnnnnnnnnnnnnnnnnnnnnnnnnnnnnnnnnnnnnnnnnnnnnnnnnnnnnnnnnnnnnnnnnnnnnnnnnnnnnnnnnnnnnnnnnnnnnnnnnnnnnnnnnnnnnnnnnnnnnnnnnnnnnnnnnnnnnnnnnnnnnnnnnnnnnnnnnnnnnnnnnnnnnnnnnnnnnnnnnnnnnnnnnnnnnnnnnnnnnnnnnnnnnnnnnnnnnnnnnnnnnnnnnnnnnnnnnnnnnnnnnnnnnnnnnnnnnnnnnnnnnnnnnnnnnnnnnnnnnnnnnnnnnnnnnnnnnnnnnnnnnnnnnnnnnnnnnnnnnnnnnnnnnnnnnnnnnnnnnnnnnnnnnnnnnnnnnnnnnnnnnnnnnnnnnnnnnnnnnnnnnnnnnnnnnnnnnnnnnnnnnnnnnnnnnnnnnnnnnnnnnnnnnnnnnnnnnnnnnnnnnnnnnnnnnnnnnnnnnnnnnnnnnnnnnnnnnnnnnnnnnnnnnnnnnnnnnnnnnnnnnnnnnnnnnnnnnnnnnnnnnnnnnnnnnnnnnnnnnnnnnnnnnnnnnnnnnnnnnnnnnnnnnnnnnnnnnnnnnnnnnnnnnnnnnnnnnnnnnnnnnnnnnnnnnnnnnnnnnnnnnnnnnnnnnnnnnnnnnnnnnnnnnnnnnnnnnnnnnnnnnnnnnnnnnnnnnnnnnnnnnnnnnnnnnnnnnnnnnnnnnnnnnnnnnnnnnnnnnnnnnnnnnnnnnnnnnnnnnnnnnnnnnnnnnnnnnnnnnnnnnnnnnnnnnnnnnnnnnnnnnnnnnnnnnnnnnnnnnnnnnnnnnnnnnnnnnnnnnnnnnnnnnnnnnnnnnnnnnnnnnnnnnnnnnnnnnnnnnnnnnnnnnnnnnnnnnnnnnnnnnnnnnnnnnnnnnnnnnnnnnnnnnnnnnnnnnnnnnnnnnnnnnnnnnnnnnnnnnnnnnnnnnnnnnnnnnnnnnnnnnnnnnnnnnnnnnnnnnnnnnnnnnnnnnnnnnnnnnnnnnnnnnnnnnnnnnnnnnnnnnnnnnnnnnnnnnnnnnnnnnnnnnnnnnnnnnnnnnnnnnnnnnnnnnnnnnnnnnnnnnnnnnnnnnnnnnnnnnnnnnnnnnnnnnnnnnnnnnnnnnnnnnnnnnnnnnnnnnnnnnnnnnnnnnnnnnnnnnnnnnnnnnnnnnnnnnnnnnnnnnnnnnnnnnnnnnnnnnnnnnnnnnnnnnnnnnnnnnnnnnnnnnnnnnnnnnnnnnnnnnnnnnnnnnnnnnnnnnnnnnnnnnnnnnnnnnnnnnnnnnnnnnnnnnnnnnnnnnnnnnnnnnnnnnnnnnnnnnnnnnnnnnnnnnnnnnnnnnnnnnnnnnnnnnnnnnnnnnnnnnnnnnnnnnnnnnnnnnnnnnnnnnnnnnnnnnnnnnnnnnnnnnnnnnnnnnnnnnnnnnnnnnnnnnnnnnnnnnnnnnnnnnnnnnnnnnnnnnnnnnnnnnnnnnnnnnnnnnnnnnnnnnnnnnnnnnnnnnnnnnnnnnnnnnnnnnnnnnnnnnnnnnnnnnnnnnnnnnnnnnnnnnnnnnnnnnnnnnnnnnnnnnnnnnnnnnnnnnnnnnnnnnnnnnnnnnnnnnnnnnnnnnnnnnnnnnnnnnnnnnnnnnnnnnnnnnnnnnnnnnnnnnnnnnnnnnnnnnnnnnnnnnnnnnnnnnnnnnnnnnnnnnnnnnnnnnnnnnnnnnnnnnnnnnnnnnnnnnnnnnnnnnnnnnnnnnnnnnnnnnnnnnnnnnnnnnnnnnnnnnnnnnnnnnnnnnnnnnnnnnnnnnnnnnnnnnnnnnnnnnnnnnnnnnnnnnnnnnnnnnnnnnnnnnnnnnnnnnnnnnnnnnnnnnnnnnnnnnnnnnnnnnnnnnnnnnnnnnnnnnnnnnnnnnnnnnnnnnnnnnnnnnnnnnnnnnnnnnnnnnnnnnnnnnnnnnnnnnnnnnnnnnnnnnnnnnnnnnnnnnnnnnnnnnnnnnnnnnnnnnnnnnnnnnnnnnnnnnnnnnnnnnnnnnnnnnnnnnnnnnnnnnnnnnnnnnnnnnnnnnnnnnnnnnnnnnnnnnnnnnnnnnnnnnnnnnnnnnnnnnnnnnnnnnnnnnnnnnnnnnnnnnnnnnnnnnnnnnnnnnnnnnnnnnnnnnnnnnnnnnnnnnnnnnnnnnnnnnnnnnnnnnnnnnnnnnnnnnnnnnnnnnnnnnnnnnnnnnnnnnnnnnnnnnnnnnnnnnnnnnnnnnnnnnnnnnnnnnnnnnnnnnnnnnnnnnnnnnnnnnnnnnnnnnnnnnnnnnnnnnnnnnnnnnnnnnnnnnnnnnnnnnnnnnnnnnnnnnnnnnnnnnnnnnnnnnnnnnnnnnnnnnnnnnnnnnnnnnnnnnnnnnnnnnnnnnnnnnnnnnnnnnnnnnnnnnnnnnnnnnnnnnnnnnnnnnnnnnnnnnnnnnnnnnnnnnnnnnnnnnnnnnnnnnnnnnnnnnnnnnnnnnnnnnnnnnnnnnnnnnnnnnnnnnnnnnnnnnnnnnnnnnnnnnnnnnnnnnnnnnnnnnnnnnnnnnnnnnnnnnnnnnnnnnnnnnnnnnnnnnnnnnnnnnnnnnnnnnnnnnnnnnnnnnnnnnnnnnnnnnnnnnnnnnnnnnnnnnnnnnnnnnnnnnnnnnnnnnnnnnnnnnnnnnnnnnnnnnnnnnnnnnnnnnnnnnnnnnnnnnnnnnnnnnnnnnnnnnnnnnnnnnnnnnnnnnnnnnnnnnnnnnnnnnnnnnnnnnnnnnnnnnnnnnnnnnnnnnnnnnnnnnnnnnnnnnnnnnnnnnnnnnnnnnnnnnnnnnnnnnnnnnnnnnnnnnnnnnnnnnnnnnnnnnnnnnnnnnnnnnnnnnnnnnnnnnnnnnnnnnnnnnnnnnnnnnnnnnnnnnnnnnnnnnnnnnnnnnnnnnnnnnnnnnnnnnnnnnnnnnnnnnnnnnnnnnnnnnnnnnnnnnnnnnnnnnnnnnnnnnnnnnnnnnnnnnnnnnnnnnnnnnnnnnnnnnnnnnnnnnnnnnnnnnnnnnnnnnnnnnnnnnnnnnnnnnnnnnnnnnnnnnnnnnnnnnnnnnnnnnnnnnnnnnnnnnnnnnnnnnnnnnnnnnnnnnnnnnnnnnnnnnnnnnnnnnnnnnnnnnnnnnnnnnnnnnnnnnnnnnnnnnnnnnnnnnnnnnnnnnnnnnnnnnnnnnnnnnnnnnnnnnnnnnnnnnnnnnnnnnnnnnnnnnnnnnnnnnnnnnnnnnnnnnnnnnnnnnnnnnnnnnnnnnnnnnnnnnnnnnnnnnnnnnnnnnnnnnnnnnnnnnnnnnnnnnnnnnnnnnnnnnnnnnnnnnnnnnnnnnnnnnnnnnnnnnnnnnnnnnnnnnnnnnnnnnnnnnnnnnnnnnnnnnnnnnnnnnnnnnnnnnnnnnnnnnnnnnnnnnnnnnnnnnnnnnnnnnnnnnnnnnnnnnnnnnnnnnnnnnnnnnnnnnnnnnnnnnnnnnnnnnnnnnnnnnnnnnnnnnnnnnnnnnnnnnnnnnnnnnnnnnnnnnnnnnnnnnnnnnnnnnnnnnnnnnnnnnnnnnnnnnnnnnnnnnnnnnnnnnnnnnnnnnnnnnnnnnnnnnnnnnnnnnnnnnnnnnnnnnnnnnnnnnnnnnnnnnnnnnnnnnnnnnnnnnnnnnnnnnnnnnnnnnnnnnnnnnnnnnnnnnnnnnnnnnnnnnnnnnnnnnnnnnnnnnnnnnnnnnnnnnnnnnnnnnnnnnnnnnnnnnnnnnnnnnnnnnnnnnnnnnnnnnnnnnnnnnnnnnnnnnnnnnnnnnnnnnnnnnnnnnnnnnnnnnnnnnnnnnnnnnnnnnnnnnnnnnnnnnnnnnnnnnnnnnnnnnnnnnnnnnnnnnnnnnnnnnnnnnnnnnnnnnnnnnnnnnnnnnnnnnnnnnnnnnnnnnnnnnnnnnnnnnnnnnnnnnnnnnnnnnnnnnnnnnnnnnnnnnnnnnnnnnnnnnnnnnnnnnnnnnnnnnnnnnnnnnnnnnnnnnnnnnnnnnnnnnnnnnnnnnnnnnnnnnnnnnnnnnnnnnnnnnnnnnnnnnnnnnnnnnnnnnnnnnnnnnnnnnnnnnnnnnnnnnnnnnnnnnnnnnnnnnnnnnnnnnnnnnnnnnnnnnnnnnnnnnnnnnnnnnnnnnnnnnnnnnnnnnnnnnnnnnnnnnnnnnnnnnnnnnnnnnnnnnnnnnnnnnnnnnnnnnnnnnnnnnnnnnnnnnnnnnnnnnnnnnnnnnnnnnnnnnnnnnnnnnnnnnnnnnnnnnnnnnnnnnnnnnnnnnnnnnnnnnnnnnnnnnnnnnnnnnnnnnnnnnnnnnnnnnnnnnnnnnnnnnnnnnnnnnnnnnnnnnnnnnnnnnnnnnnnnnnnnnnnnnnnnnnnnnnnnnnnnnnnnnnnnnnnnnnnnnnnnnnnnnnnnnnnnnnnnnnnnnnnnnnnnnnnnnnnnnnnnnnnnnnnnnnnnnnnnnnnnnnnnnnnnnnnnnnnnnnnnnnnnnnnnnnnnnnnnnnnnnnnnnnnnnnnnnnnnnnnnnnnnnnnnnnnnnnnnnnnnnnnnnnnnnnnnnnnnnnnnnnnnnnnnnnnnnnnnnnnnnnnnnnnnnnnnnnnnnnnnnnnnnnnnnnnnnnnnnnnnnnnnnnnnnnnnnnnnnnnnnnnnnnnnnnnnnnnnnnnnnnnnnnnnnnnnnnnnnnnnnnnnnnnnnnnnnnnnnnnnnnnnnnnnnnnnnnnnnnnnnnnnnnnnnnnnnnnnnnnnnnnnnnnnnnnnnnnnnnnnnnnnnnnnnnnnnnnnnnnnnnnnnnnnnnnnnnnnnnnnnnnnnnnnnnnnnnnnnnnnnnnnnnnnnnnnnnnnnnnnnnnnnnnnnnnnnnnnnnnnnnnnnnnnnnnnnnnnnnnnnnnnnnnnnnnnnnnnnnnnnnnnnnnnnnnnnnnnnnnnnnnnnnnnnnnnnnnnnnnnnnnnnnnnnnnnnnnnnnnnnnnnnnnnnnnnnnnnnnnnnnnnnnnnnnnnnnnnnnnnnnnnnnnnnnnnnnnnnnnnnnnnnnnnnnnnnnnnnnnnnnnnnnnnnnnnnnnnnnnnnnnnnnnnnnnnnnnnnnnnnnnnnnnnnnnnnnnnnnnnnnnnnnnnnnnnnnnnnnnnnnnnnnnnnnnnnnnnnnnnnnnnnnnnnnnnnnnnnnnnnnnnnnnnnnnnnnnnnnnnnnnnnnnnnnnnnnnnnnnnnnnnnnnnnnnnnnnnnnnnnnnnnnnnnnnnnnnnnnnnnnnnnnnnnnnnnnnnnnnnnnnnnnnnnnnnnnnnnnnnnnnnnnnnnnnnnnnnnnnnnnnnnnnnnnnnnnnnnnnnnnnnnnnnnnnnnnnnnnnnnnnnnnnnnnnnnnnnnnnnnnnnnnnnnnnnnnnnnnnnnnnnnnnnnnnnnnnnnnnnnnnnnnnnnnnnnnnnnnnnnnnnnnnnnnnnnnnnnnnnnnnnnnnnnnnnnnnnnnnnnnnnnnnnnnnnnnnnnnnnnnnnnnnnnnnnnnnnnnnnnnnnnnnnnnnnnnnnnnnnnnnnnnnnnnnnnnnnnnnnnnnnnnnnnnnnnnnnnnnnnnnnnnnnnnnnnnnnnnnnnnnnnnnnnnnnnnnnnnnnnnnnnnnnnnnnnnnnnnnnnnnnnnnnnnnnnnnnnnnnnnnnnnnnnnnnnnnnnnnnnnnnnnnnnnnnnnnnnnnnnnnnnnnnnnnnnnnnnnnnnnnnnnnnnnnnnnnnnnnnnnnnnnnnnnnnnnnnnnnnnnnnnnnnnnnnnnnnnnnnnnnnnnnnnnnnnnnnnnnnnnnnnnnnnnnnnnnnnnnnnnnnnnnnnnnnnnnnnnnnnnnnnnnnnnnnnnnnnnnnnnnnnnnnnnnnnnnnnnnnnnnnnnnnnnnnnnnnnnnnnnnnnnnnnnnnnnnnnnnnnnnnnnnnnnnnnnnnnnnnnnnnnnnnnnnnnnnnnnnnnnnnnnnnnnnnnnnnnnnnnnnnnnnnnnnnnnnnnnnnnnnnnnnnnnnnnnnnnnnnnnnnnnnnnnnnnnnnnnnnnnnnnnnnnnnnnnnnnnnnnnnnnnnnnnnnnnnnnnnnnnnnnnnnnnnnnnnnnnnnnnnnnnnnnnnnnnnnnnnnnnnnnnnnnnnnnnnnnnnnnnnnnnnnnnnnnnnnnnnnnnnnnnnnnnnnnnnnnnnnnnnnnnnnnnnnnnnnnnnnnnnnnnnnnnnnnnnnnnnnnnnnnnnnnnnnnnnnnnnnnnnnnnnnnnnnnnnnnnnnnnnnnnnnnnnnnnnnnnnnnnnnnnnnnnnnnnnnnnnnnnnnnnnnnnnnnnnnnnnnnnnnnnnnnnnnnnnnnnnnnnnnnnnnnnnnnnnnnnnnnnnnnnnnnnnnnnnnnnnnnnnnnnnnnnnnnnnnnnnnnnnnnnnnnnnnnnnnnnnnnnnnnnnnnnnnnnnnnnnnnnnnnnnnnnnnnnnnnnnnnnnnnnnnnnnnnnnnnnnnnnnnnnnnnnnnnnnnnnnnnnnnnnnnnnnnnnnnnnnnnnnnnnnnnnnnnnnnnnnnnnnnnnnnnnnnnnnnnnnnnnnnnnnnnnnnnnnnnnnnnnnnnnnnnnnnnnnnnnnnnnnnnnnnnnnnnnnnnnnnnnnnnnnnnnnnnnnnnnnnnnnnnnnnnnnnnnnnnnnnnnnnnnnnnnnnnnnnnnnnnnnnnnnnnnnnnnnnnnnnnnnnnnnnnnnnnnnnnnnnnnnnnnnnnnnnnnnnnnnnnnnnnnnnnnnnnnnnnnnnnnnnnnnnnnnnnnnnnnnnnnnnnnnnnnnnnnnnnnnnnnnnnnnnnnnnnnnnnnnnnnnnnnnnnnnnnnnnnnnnnnnnnnnnnnnnnnnnnnnnnnnnnnnnnnnnnnnnnnnnnnnnnnnnnnnnnnnnnnnnnnnnnnnnnnnnnnnnnnnnnnnnnnnnnnnnnnnnnnnnnnnnnnnnnnnnnnnnnnnnnnnnnnnnnnnnnnnnnnnnnnnnnnnnnnnnnnnnnnnnnnnnnnnnnnnnnnnnnnnnnnnnnnnnnnnnnnnnnnnnnnnnnnnnnnnnnnnnnnnnnnnnnnnnnnnnnnnnnnnnnnnnnnnnnnnnnnnnnnnnnnnnnnnnnnnnnnnnnnnnnnnnnnnnnnnnnnnnnnnnnnnnnnnnnnnnnnnnnnnnnnnnnnnnnnnnnnnnnnnnnnnnnnnnnnnnnnnnnnnnnnnnnnnnnnnnnnnnnnnnnnnnnnnnnnnnnnnnnnnnnnnnnnnnnnnnnnnnnnnnnnnnnnnnnnnnnnnnnnnnnnnnnnnnnnnnnnnnnnnnnnnnnnnnnnnnnnnnnnnnnnnnnnnnnnnnnnnnnnnnnnnnnnnnnnnnnnnnnnnnnnnnnnnnnnnnnnnnnnnnnnnnnnnnnnnnnnnnnnnnnnnnnnnnnnnnnnnnnnnnnnnnnnnnnnnnnnnnnnnnnnnnnnnnnnnnnnnnnnnnnnnnnnnnnnnnnnnnnnnnnnnnnnnnnnnnnnnnnnnnnnnnnnnnnnnnnnnnnnnnnnnnnnnnnnnnnnnnnnnnnnnnnnnnnnnnnnnnnnnnnnnnnnnnnnnnnnnnnnnnnnnnnnnnnnnnnnnnnnnnnnnnnnnnnnnnnnnnnnnnnnnnnnnnnnnnnnnnnnnnnnnnnnnnnnnnnnnnnnnnnnnnnnnnnnnnnnnnnnnnnnnnnnnnnnnnnnnnnnnnnnnnnnnnnnnnnnnnnnnnnnnnnnnnnnnnnnnnnnnnnnnnnnnnnnnnnnnnnnnnnnnnnnnnnnnnnnnnnnnnnnnnnnnnnnnnnnnnnnnnnnnnnnnnnnnnnnnnnnnnnnnnnnnnnnnnnnnnnnnnnnnnnnnnnnnnnnnnnnnnnnnnnnnnnnnnnnnnnnnnnnnnnnnnnnnnnnnnnnnnnnnnnnnnnnnnnnnnnnnnnnnnnnnnnnnnnnnnnnnnnnnnnnnnnnnnnnnnnnnnnnnnnnnnnnnnnnnnnnnnnnnnnnnnnnnnnnnnnnnnnnnnnnnnnnnnnnnnnnnnnnnnnnnnnnnnnnnnnnnnnnnnnnnnnnnnnnnnnnnnnnnnnnnnnnnnnnnnnnnnnnnnnnnnnnnnnnnnnnnnnnnnnnnnnnnnnnnnnnnnnnnnnnnnnnnnnnnnnnnnnnnnnnnnnnnnnnnnnnnnnnnnnnnnnnnnnnnnnnnnnnnnnnnnnnnnnnnnnnnnnnnnnnnnnnnnnnnnnnnnnnnnnnnnnnnnnnnnnnnnnnnnnnnnnnnnnnnnnnnnnnnnnnnnnnnnnnnnnnnnnnnnnnnnnnnnnnnnnnnnnnnnnnnnnnnnnnnnnnnnnnnnnnnnnnnnnnnnnnnnnnnnnnnnnnnnnnnnnnnnnnnnnnnnnnnnnnnnnnnnnnnnnnnnnnnnnnnnnnnnnnnnnnnnnnnnnnnnnnnnnnnnnnnnnnnnnnnnnnnnnnnnnnnnnnnnnnnnnnnnnnnnnnnnnnnnnnnnnnnnnnnnnnnnnnnnnnnnnnnnnnnnnnnnnnnnnnnnnnnnnnnnnnnnnnnnnnnnnnnnnnnnnnnnnnnnnnnnnnnnnnnnnnnnnnnnnnnnnnnnnnnnnnnnnnnnnnnnnnnnnnnnnnnnnnnnnnnnnnnnnnnnnnnnnnnnnnnnnnnnnnnnnnnnnnnnnnnnnnnnnnnnnnnnnnnnnnnnnnnnnnnnnnnnnnnnnnnnnnnnnnnnnnnnnnnnnnnnnnnnnnnnnnnnnnnnnnnnnnnnnnnnnnnnnnnnnnnnnnnnnnnnnnnnnnnnnnnnnnnnnnnnnnnnnnnnnnnnnnnnnnnnnnnnnnnnnnnnnnnnnnnnnnnnnnnnnnnnnnnnnnnnnnnnnnnnnnnnnnnnnnnnnnnnnnnnnnnnnnnnnnnnnnnnnnnnnnnnnnnnnnnnnnnnnnnnnnnnnnnnnnnnnnnnnnnnnnnnnnnnnnnnnnnnnnnnnnnnnnnnnnnnnnnnnnnnnnnnnnnnnnnnnnnnnnnnnnnnnnnnnnnnnnnnnnnnnnnnnnnnnnnnnnnnnnnnnnnnnnnnnnnnnnnnnnnnnnnnnnnnnnnnnnnnnnnnnnnnnnnnnnnnnnnnnnnnnnnnnnnnnnnnnnnnnnnnnnnnnnnnnnnnnnnnnnnnnnnnnnnnnnnnnnnnnnnnnnnnnnnnnnnnnnnnnnnnnnnnnnnnnnnnnnnnnnnnnnnnnnnnnnnnnnnnnnnnnnnnnnnnnnnnnnnnnnnnnnnnnnnnnnnnnnnnnnnnnnnnnnnnnnnnnnnnnnnnnnnnnnnnnnnnnnnnnnnnnnnnnnnnnnnnnnnnnnnnnnnnnnnnnnnnnnnnnnnnnnnnnnnnnnnnnnnnnnnnnnnnnnnnnnnnnnnnnnnnnnnnnnnnnnnnnnnnnnnnnnnnnnnnnnnnnnnnnnnnnnnnnnnnnnnnnnnnnnnnnnnnnnnnnnnnnnnnnnnnnnnnnnnnnnnnnnnnnnnnnnnnnnnnnnnnnnnnnnnnnnnnnnnnnnnnnnnnnnnnnnnnnnnnnnnnnnnnnnnnnnnnnnnnnnnnnnnnnnnnnnnnnnnnnnnnnnnnnnnnnnnnnnnnnnnnnnnnnnnnnnnnnnnnnnnnnnnnnnnnnnnnnnnnnnnnnnnnnnnnnnnnnnnnnnnnnnnnnnnnnnnnnnnnnnnnnnnnnnnnnnnnnnnnnnnnnnnnnnnnnnnnnnnnnnnnnnnnnnnnnnnnnnnnnnnnnnnnnnnnnnnnnnnnnnnnnnnnnnnnnnnnnnnnnnnnnnnnnnnnnnnnnnnnnnnnnnnnnnnnnnnnnnnnnnnnnnnnnnnnnnnnnnnnnnnnnnnnnnnnnnnnnnnnnnnnnnnnnnnnnnnnnnnnnnnnnnnnnnnnnnnnnnnnnnnnnnnnnnnnnnnnnnnnnnnnnnnnnnnnnnnnnnnnnnnnnnnnnnnnnnnnnnnnnnnnnnnnnnnnnnnnnnnnnnnnnnnnnnnnnnnnnnnnnnnnnnnnnnnnnnnnnnnnnnnnnnnnnnnnnnnnnnnnnnnnnnnnnnnnnnnnnnnnnnnnnnnnnnnnnnnnnnnnnnnnnnnnnnnnnnnnnnnnnnnnnnnnnnnnnnnnnnnnnnnnnnnnnnnnnnnnnnnnnnnnnnnnnnnnnnnnnnnnnnnnnnnnnnnnnnnnnnnnnnnnnnnnnnnnnnnnnnnnnnnnnnnnnnnnnnnnnnnnnnnnnnnnnnnnnnnnnnnnnnnnnnnnnnnnnnnnnnnnnnnnnnnnnnnnnnnnnnnnnnnnnnnnnnnnnnnnnnnnnnnnnnnnnnnnnnnnnnnnnnnnnnnnnnnnnnnnnnnnnnnnnnnnnnnnnnnnnnnnnnnnnnnnnnnnnnnnnnnnnnnnnnnnnnnnnnnnnnnnnnnnnnnnnnnnnnnnnnnnnnnnnnnnnnnnnnnnnnnnnnnnnnnnnnnnnnnnnnnnnnnnnnnnnnnnnnnnnnnnnnnnnnnnnnnnnnnnnnnnnnnnnnnnnnnnnnnnnnnnnnnnnnnnnnnnnnnnnnnnnnnnnnnnnnnnnnnnnnnnnnnnnnnnnnnnnnnnnnnnnnnnnnnnnnnnnnnnnnnnnnnnnnnnnnnnnnnnnnnnnnnnnnnnnnnnnnnnnnnnnnnnnnnnnnnnnnnnnnnnnnnnnnnnnnnnnnnnnnnnnnnnnnnnnnnnnnnnnnnnnnnnnnnnnnnnnnnnnnnnnnnnnnnnnnnnnnnnnnnnnnnnnnnnnnnnnnnnnnnnnnnnnnnnnnnnnnnnnnnnnnnnnnnnnnnnnnnnnnnnnnnnnnnnnnnnnnnnnnnnnnnnnnnnnnnnnnnnnnnnnnnnnnnnnnnnnnnnnnnnnnnnnnnnnnnnnnnnnnnnnnnnnnnnnnnnnnnnnnnnnnnnnnnnnnnnnnnnnnnnnnnnnnnnnnnnnnnnnnnnnnnnnnnnnnnnnnnnnnnnnnnnnnnnnnnnnnnnnnnnnnnnnnnnnnnnnnnnnnnnnnnnnnnnnnnnnnnnnnnnnnnnnnnnnnnnnnnnnnnnnnnnnnnnnnnnnnnnnnnnnnnnnnnnnnnnnnnnnnnnnnnnnnnnnnnnnnnnnnnnnnnnnnnnnnnnnnnnnnnnnnnnnnnnnnnnnnnnnnnnnnnnnnnnnnnnnnnnnnnnnnnnnnnnnnnnnnnnnnnnnnnnnnnnnnnnnnnnnnnnnnnnnnnnnnnnnnnnnnnnnnnnnnnnnnnnnnnnnnnnnnnnnnnnnnnnnnnnnnnnnnnnnnnnnnnnnnnnnnnnnnnnnnnnnnnnnnnnnnnnnnnnnnnnnnnnnnnnnnnnnnnnnnnnnnnnnnnnnnnnnnnnnnnnnnnnnnnnnnnnnnnnnnnnnnnnnnnnnnnnnnnnnnnnnnnnnnnnnnnnnnnnnnnnnnnnnnnnnnnnnnnnnnnnnnnnnnnnnnnnnnnnnnnnnnnnnnnnnnnnnnnnnnnnnnnnnnnnnnnnnnnnnnnnnnnnnnnnnnnnnnnnnnnnnnnnnnnnnnnnnnnnnnnnnnnnnnnnnnnnnnnnnnnnnnnnnnnnnnnnnnnnnnnnnnnnnnnnnnnnnnnnnnnnnnnnnnnnnnnnnnnnnnnnnnnnnnnnnnnnnnnnnnnnnnnnnnnnnnnnnnnnnnnnnnnnnnnnnnnnnnnnnnnnnnnnnnnnnnnnnnnnnnnnnnnnnnnnnnnnnnnnnnnnnnnnnnnnnnnnnnnnnnnnnnnnnnnnnnnnnnnnnnnnnnnnnnnnnnnnnnnnnnnnnnnnnnnnnnnnnnnnnnnnnnnnnnnnnnnnnnnnnnnnnnnnnnnnnnnnnnnnnnnnnnnnnnnnnnnnnnnnnnnnnnnnnnnnnnnnnnnnnnnnnnnnnnnnnnnnnnnnnnnnnnnnnnnnnnnnnnnnnnnnnnnnnnnnnnnnnnnnnnnnnnnnnnnnnnnnnnnnnnnnnnnnnnnnnnnnnnnnnnnnnnnnnnnnnnnnnnnnnnnnnnnnnnnnnnnnnnnnnnnnnnnnnnnnnnnnnnnnnnnnnnnnnnnnnnnnnnnnnnnnnnnnnnnnnnnnnnnnnnnnnnnnnnnnnnnnnnnnnnnnnnnnnnnnnnnnnnnnnnnnnnnnnnnnnnnnnnnnnnnnnnnnnnnnnnnnnnnnnnnnnnnnnnnnnnnnnnnnnnnnnnnnnnnnnnnnnnnnnnnnnnnnnnnnnnnnnnnnnnnnnnnnnnnnnnnnnnnnnnnnnnnnnnnnnnnnnnnnnnnnnnnnnnnnnnnnnnnnnnnnnnnnnnnnnnnnnnnnnnnnnnnnnnnnnnnnnnnnnnnnnnnnnnnnnnnnnnnnnnnnnnnnnnnnnnnnnnnnnnnnnnnnnnnnnnnnnnnnnnnnnnnnnnnnnnnnnnnnnnnnnnnnnnnnnnnnnnnnnnnnnnnnnnnnnnnnnnnnnnnnnnnnnnnnnnnnnnnnnnnnnnnnnnnnnnnnnnnnnnnnnnnnnnnnnnnnnnnnnnnnnnnnnnnnnnnnnnnnnnnnnnnnnnnnnnnnnnnnnnnnnnnnnnnnnnnnnnnnnnnnnnnnnnnnnnnnnnnnnnnnnnnnnnnnnnnnnnnnnnnnnnnnnnnnnnnnnnnnnnnnnnnnnnnnnnnnnnnnnnnnnnnnnnnnnnnnnnnnnnnnnnnnnnnnnnnnnnnnnnnnnnnnnnnnnnnnnnnnnnnnnnnnnnnnnnnnnnnnnnnnnnnnnnnnnnnnnnnnnnnnnnnnnnnnnnnnnnnnnnnnnnnnnnnnnnnnnnnnnnnnnnnnnnnnnnnnnnnnnnnnnnnnnnnnnnnnnnnnnnnnnnnnnnnnnnnnnnnnnnnnnnnnnnnnnnnnnnnnnnnnnnnnnnnnnnnnnnnnnnnnnnnnnnnnnnnnnnnnnnnnnnnnnnnnnnnnnnnnnnnnnnnnnnnnnnnnnnnnnnnnnnnnnnnnnnnnnnnnnnnnnnnnnnnnnnnnnnnnnnnnnnnnnnnnnnnnnnnnnnnnnnnnnnnnnnnnnnnnnnnnnnnnnnnnnnnnnnnnnnnnnnnnnnnnnnnnnnnnnnnnnnnnnnnnnnnnnnnnnnnnnnnnnnnnnnnnnnnnnnnnnnnnnnnnnnnnnnnnnnnnnnnnnnnnnnnnnnnnnnnnnnnnnnnnnnnnnnnnnnnnnnnnnnnnnnnnnnnnnnnnnnnnnnnnnnnnnnnnnnnnnnnnnnnnnnnnnnnnnnnnnnnnnnnnnnnnnnnnnnnnnnnnnnnnnnnnnnnnnnnnnnnnnnnnnnnnnnnnnnnnnnnnnnnnnnnnnnnnnnnnnnnnnnnnnnnnnnnnnnnnnnnnnnnnnnnnnnnnnnnnnnnnnnnnnnnnnnnnnnnnnnnnnnnnnnnnnnnnnnnnnnnnnnnnnnnnnnnnnnnnnnnnnnnnnnnnnnnnnnnnnnnnnnnnnnnnnnnnnnnnnnnnnnnnnnnnnnnnnnnnnnnnnnnnnnnnnnnnnnnnnnnnnnnnnnnnnnnnnnnnnnnnnnnnnnnnnnnnnnnnnnnnnnnnnnnnnnnnnnnnnnnnnnnnnnnnnnnnnnnnnnnnnnnnnnnnnnnnnnnnnnnnnnnnnnnnnnnnnnnnnnnnnnnnnnnnnnnnnnnnnnnnnnnnnnnnnnnnnnnnnnnnnnnnnnnnnnnnnnnnnnnnnnnnnnnnnnnnnnnnnnnnnnnnnnnnnnnnnnnnnnnnnnnnnnnnnnnnnnnnnnnnnnnnnnnnnnnnnnnnnnnnnnnnnnnnnnnnnnnnnnnnnnnnnnnnnnnnnnnnnnnnnnnnnnnnnnnnnnnnnnnnnnnnnnnnnnnnnnnnnnnnnnnnnnnnnnnnnnnnnnnnnnnnnnnnnnnnnnnnnnnnnnnnnnnnnnnnnnnnnnnnnnnnnnnnnnnnnnnnnnnnnnnnnnnnnnnnnnnnnnnnnnnnnnnnnnnnnnnnnnnnnnnnnnnnnnnnnnnnnnnnnnnnnnnnnnnnnnnnnnnnnnnnnnnnnnnnnnnnnnnnnnnnnnnnnnnnnnnnnnnnnnnnnnnnnnnnnnnnnnnnnnnnnnnnnnnnnnnnnnnnnnnnnnnnnnnnnnnnnnnnnnnnnnnnnnnnnnnnnnnnnnnnnnnnnnnnnnnnnnnnnnnnnnnnnnnnnnnnnnnnnnnnnnnnnnnnnnnnnnnnnnnnnnnnnnnnnnnnnnnnnnnnnnnnnnnnnnnnnnnnnnnnnnnnnnnnnnnnnnnnnnnnnnnnnnnnnnnnnnnnnnnnnnnnnnnnnnnnnnnnnnnnnnnnnnnnnnnnnnnnnnnnnnnnnnnnnnnnnnnnnnnnnnnnnnnnnnnnnnnnnnnnnnnnnnnnnnnnnnnnnnnnnnnnnnnnnnnnnnnnnnnnnnnnnnnnnnnnnnnnnnnnnnnnnnnnnnnnnnnnnnnnnnnnnnnnnnnnnnnnnnnnnnnnnnnnnnnnnnnnnnnnnnnnnnnnnnnnnnnnnnnnnnnnnnnnnnnnnnnnnnnnnnnnnnnnnnnnnnnnnnnnnnnnnnnnnnnnnnnnnnnnnnnnnnnnnnnnnnnnnnnnnnnnnnnnnnnnnnnnnnnnnnnnnnnnnnnnnnnnnnnnnnnnnnnnnnnnnnnnnnnnnnnnnnnnnnnnnnnnnnnnnnnnnnnnnnnnnnnnnnnnnnnnnnnnnnnnnnnnnnnnnnnnnnnnnnnnnnnnnnnnnnnnnnnnnnnnnnnnnnnnnnnnnnnnnnnnnnnnnnnnnnnnnnnnnnnnnnnnnnnnnnnnnnnnnnnnnnnnnnnnnnnnnnnnnnnnnnnnnnnnnnnnnnnnnnnnnnnnnnnnnnnnnnnnnnnnnnnnnnnnnnnnnnnnnnnnnnnnnnnnnnnnnnnnnnnnnnnnnnnnnnnnnnnnnnnnnnnnnnnnnnnnnnnnnnnnnnnnnnnnnnnnnnnnnnnnnnnnnnnnnnnnnnnnnnnnnnnnnnnnnnnnnnnnnnnnnnnnnnnnnnnnnnnnnnnnnnnnnnnnnnnnnnnnnnnnnnnnnnnnnnnnnnnnnnnnnnnnnnnnnnnnnnnnnnnnnnnnnnnnnnnnnnnnnnnnnnnnnnnnnnnnnnnnnnnnnnnnnnnnnnnnnnnnnnnnnnnnnnnnnnnnnnnnnnnnnnnnnnnnnnnnnnnnnnnnnnnnnnnnnnnnnnnnnnnnnnnnnnnnnnnnnnnnnnnnnnnnnnnnnnnnnnnnnnnnnnnnnnnnnnnnnnnnnnnnnnnnnnnnnnnnnnnnnnnnnnnnnnnnnnnnnnnnnnnnnnnnnnnnnnnnnnnnnnnnnnnnnnnnnnnnnnnnnnnnnnnnnnnnnnnnnnnnnnnnnnnnnnnnnnnnnnnnnnnnnnnnnnnnnnnnnnnnnnnnnnnnnnnnnnnnnnnnnnnnnnnnnnnnnnnnnnnnnnnnnnnnnnnnnnnnnnnnnnnnnnnnnnnnnnnnnnnnnnnnnnnnnnnnnnnnnnnnnnnnnnnnnnnnnnnnnnnnnnnnnnnnnnnnnnnnnnnnnnnnnnnnnnnnnnnnnnnnnnnnnnnnnnnnnnnnnnnnnnnnnnnnnnnnnnnnnnnnnnnnnnnnnnnnnnnnnnnnnnnnnnnnnnnnnnnnnnnnnnnnnnnnnnnnnnnnnnnnnnnnnnnnnnnnnnnnnnnnnnnnnnnnnnnnnnnnnnnnnnnnnnnnnnnnnnnnnnnnnnnnnnnnnnnnnnnnnnnnnnnnnnnnnnnnnnnnnnnnnnnnnnnnnnnnnnnnnnnnnnnnnnnnnnnnnnnnnnnnnnnnnnnnnnnnnnnnnnnnnnnnnnnnnnnnnnnnnnnnnnnnnnnnnnnnnnnnnnnnnnnnnnnnnnnnnnnnnnnnnnnnnnnnnnnnnnnnnnnnnnnnnnnnnnnnnnnnnnnnnnnnnnnnnnnnnnnnnnnnnnnnnnnnnnnnnnnnnnnnnnnnnnnnnnnnnnnnnnnnnnnnnnnnnnnnnnnnnnnnnnnnnnnnnnnnnnnnnnnnnnnnnnnnnnnnnnnnnnnnnnnnnnnnnnnnnnnnnnnnnnnnnnnnnnnnnnnnnnnnnnnnnnnnnnnnnnnnnnnnnnnnnnnnnnnnnnnnnnnnnnnnnnnnnnnnnnnnnnnnnnnnnnnnnnnnnnnnnnnnnnnnnnnnnnnnnnnnnnnnnnnnnnnnnnnnnnnnnnnnnnnnnnnnnnnnnnnnnnnnnnnnnnnnnnnnnnnnnnnnnnnnnnnnnnnnnnnnnnnnnnnnnnnnnnnnnnnnnnnnnnnnnnnnnnnnnnnnnnnnnnnnnnnnnnnnnnnnnnnnnnnnnnnnnnnnnnnnnnnnnnnnnnnnnnnnnnnnnnnnnnnnnnnnnnnnnnnnnnnnnnnnnnnnnnnnnnnnnnnnnnnnnnnnnnnnnnnnnnnnnnnnnnnnnnnnnnnnnnnnnnnnnnnnnnnnnnnnnnnnnnnnnnnnnnnnnnnnnnnnnnnnnnnnnnnnnnnnnnnnnnnnnnnnnnnnnnnnnnnnnnnnnnnnnnnnnnnnnnnnnnnnnnnnnnnnnnnnnnnnnnnnnnnnnnnnnnnnnnnnnnnnnnnnnnnnnnnnnnnnnnnnnnnnnnnnnnnnnnnnnnnnnnnnnnnnnnnnnnnnnnnnnnnnnnnnnnnnnnnnnnnnnnnnnnnnnnnnnnnnnnnnnnnnnnnnnnnnnnnnnnnnnnnnnnnnnnnnnnnnnnnnnnnnnnnnnnnnnnnnnnnnnnnnnnnnnnnnnnnnnnnnnnnnnnnnnnnnnnnnnnnnnnnnnnnnnnnnnnnnnnnnnnnnnnnnnnnnnnnnnnnnnnnnnnnnnnnnnnnnnnnnnnnnnnnnnnnnnnnnnnnnnnnnnnnnnnnnnnnnnnnnnnnnnnnnnnnnnnnnnnnnnnnnnnnnnnnnnnnnnnnnnnnnnnnnnnnnnnnnnnnnnnnnnnnnnnnnnnnnnnnnnnnnnnnnnnnnnnnnnnnnnnnnnnnnnnnnnnnnnnnnnnnnnnnnnnnnnnnnnnnnnnnnnnnnnnnnnnnnnnnnnnnnnnnnnnnnnnnnnnnnnnnnnnnnnnnnnnnnnnnnnnnnnnnnnnnnnnnnnnnnnnnnnnnnnnnnnnnnnnnnnnnnnnnnnnnnnnnnnnnnnnnnnnnnnnnnnnnnnnnnnnnnnnnnnnnnnnnnnnnnnnnnnnnnnnnnnnnnnnnnnnnnnnnnnnnnnnnnnnnnnnnnnnnnnnnnnnnnnnnnnnnnnnnnnnnnnnnnnnnnnnnnnnnnnnnnnnnnnnnnnnnnnnnnnnnnnnnnnnnnnnnnnnnnnnnnnnnnnnnnnnnnnnnnnnnnnnnnnnnnnnnnnnnnnnnnnnnnnnnnnnnnnnnnnnnnnnnnnnnnnnnnnnnnnnnnnnnnnnnnnnnnnnnnnnnnnnnnnnnnnnnnnnnnnnnnnnnnnnnnnnnnnnnnnnnnnnnnnnnnnnnnnnnnnnnnnnnnnnnnnnnnnnnnnnnnnnnnnnnnnnnnnnnnnnnnnnnnnnnnnnnnnnnnnnnnnnnnnnnnnnnnnnnnnnnnnnnnnnnnnnnnnnnnnnnnnnnnnnnnnnnnnnnnnnnnnnnnnnnnnnnnnnnnnnnnnnnnnnnnnnnnnnnnnnnnnnnnnnnnnnnnnnnnnnnnnnnnnnnnnnnnnnnnnnnnnnnnnnnnnnnnnnnnnnnnnnnnnnnnnnnnnnnnnnnnnnnnnnnnnnnnnnnnnnnnnnnnnnnnnnnnnnnnnnnnnnnnnnnnnnnnnnnnnnnnnnnnnnnnnnnnnnnnnnnnnnnnnnnnnnnnnnnnnnnnnnnnnnnnnnnnnnnnnnnnnnnnnnnnnnnnnnnnnnnnnnnnnnnnnnnnnnnnnnnnnnnnnnnnnnnnnnnnnnnnnnnnnnnnnnnnnnnnnnnnnnnnnnnnnnnnnnnnnnnnnnnnnnnnnnnnnnnnnnnnnnnnnnnnnnnnnnnnnnnnnnnnnnnnnnnnnnnnnnnnnnnnnnnnnnnnnnnnnnnnnnnnnnnnnnnnnnnnnnnnnnnnnnnnnnnnnnnnnnnnnnnnnnnnnnnnnnnnnnnnnnnnnnnnnnnnnnnnnnnnnnnnnnnnnnnnnnnnnnnnnnnnnnnnnnnnnnnnnnnnnnnnnnnnnnnnnnnnnnnnnnnnnnnnnnnnnnnnnnnnnnnnnnnnnnnnnnnnnnnnnnnnnnnnnnnnnnnnnnnnnnnnnnnnnnnnnnnnnnnnnnnnnnnnnnnnnnnnnnnnnnnnnnnnnnnnnnnnnnnnnnnnnnnnnnnnnnnnnnnnnnnnnnnnnnnnnnnnnnnnnnnnnnnnnnnnnnnnnnnnnnnnnnnnnnnnnnnnnnnnnnnnnnnnnnnnnnnnnnnnnnnnnnnnnnnnnnnnnnnnnnnnnnnnnnnnnnnnnnnnnnnnnnnnnnnnnnnnnnnnnnnnnnnnnnnnnnnnnnnnnnnnnnnnnnnnnnnnnnnnnnnnnnnnnnnnnnnnnnnnnnnnnnnnnnnnnnnnnnnnnnnnnnnnnnnnnnnnnnnnnnnnnnnnnnnnnnnnnnnnnnnnnnnnnnnnnnnnnnnnnnnnnnnnnnnnnnnnnnnnnnnnnnnnnnnnnnnnnnnnnnnnnnnnnnnnnnnnnnnnnnnnnnnnnnnnnnnnnnnnnnnnnnnnnnnnnnnnnnnnnnnnnnnnnnnnnnnnnnnnnnnnnnnnnnnnnnnnnnnnnnnnnnnnnnnnnnnnnnnnnnnnnnnnnnnnnnnnnnnnnnnnnnnnnnnnnnnnnnnnnnnnnnnnnnnnnnnnnnnnnnnnnnnnnnnnnnnnnnnnnnnnnnnnnnnnnnnnnnnnnnnnnnnnnnnnnnnnnnnnnnnnnnnnnnnnnnnnnnnnnnnnnnnnnnnnnnnnnnnnnnnnnnnnnnnnnnnnnnnnnnnnnnnnnnnnnnnnnnnnnnnnnnnnnnnnnnnnnnnnnnnnnnnnnnnnnnnnnnnnnnnnnnnnnnnnnnnnnnnnnnnnnnnnnnnnnnnnnnnnnnnnnnnnnnnnnnnnnnnnnnnnnnnnnnnnnnnnnnnnnnnnnnnnnnnnnnnnnnnnnnnnnnnnnnnnnnnnnnnnnnnnnnnnnnnnnnnnnnnnnnnnnnnnnnnnnnnnnnnnnnnnnnnnnnnnnnnnnnnnnnnnnnnnnnnnnnnnnnnnnnnnnnnnnnnnnnnnnnnnnnnnnnnnnnnnnnnnnnnnnnnnnnnnnnnnnnnnnnnnnnnnnnnnnnnnnnnnnnnnnnnnnnnnnnnnnnnnnnnnnnnnnnnnnnnnnnnnnnnnnnnnnnnnnnnnnnnnnnnnnnnnnnnnnnnnnnnnnnnnnnnnnnnnnnnnnnnnnnnnnnnnnnnnnnnnnnnnnnnnnnnnnnnnnnnnnnnnnnnnnnnnnnnnnnnnnnnnnnnnnnnnnnnnnnnnnnnnnnnnnnnnnnnnnnnnnnnnnnnnnnnnnnnnnnnnnnnnnnnnnnnnnnnnnnnnnnnnnnnnnnnnnnnnnnnnnnnnnnnnnnnnnnnnnnnnnnnnnnnnnnnnnnnnnnnnnnnnnnnnnnnnnnnnnnnnnnnnnnnnnnnnnnnnnnnnnnnnnnnnnnnnnnnnnnnnnnnnnnnnnnnnnnnnnnnnnnnnnnnnnnnnnnnnnnnnnnnnnnnnnnnnnnnnnnnnnnnnnnnnnnnnnnnnnnnnnnnnnnnnnnnnnnnnnnnnnnnnnnnnnnnnnnnnnnnnnnnnnnnnnnnnnnnnnnnnnnnnnnnnnnnnnnnnnnnnnnnnnnnnnnnnnnnnnnnnnnnnnnnnnnnnnnnnnnnnnnnnnnnnnnnnnnnnnnnnnnnnnnnnnnnnnnnnnnnnnnnnnnnnnnnnnnnnnnnnnnnnnnnnnnnnnnnnnnnnnnnnnnnnnnnnnnnnnnnnnnnnnnnnnnnnnnnnnnnnnnnnnnnnnnnnnnnnnnnnnnnnnnnnnnnnnnnnnnnnnnnnnnnnnnnnnnnnnnnnnnnnnnnnnnnnnnnnnnnnnnnnnnnnnnnnnnnnnnnnnnnnnnnnnnnnnnnnnnnnnnnnnnnnnnnnnnnnnnnnnnnnnnnnnnnnnnnnnnnnnnnnnnnnnnnnnnnnnnnnnnnnnnnnnnnnnnnnnnnnnnnnnnnnnnnnnnnnnnnnnnnnnnnnnnnnnnnnnnnnnnnnnnnnnnnnnnnnnnnnnnnnnnnnnnnnnnnnnnnnnnnnnnnnnnnnnnnnnnnnnnnnnnnnnnnnnnnnnnnnnnnnnnnnnnnnnnnnnnnnnnnnnnnnnnnnnnnnnnnnnnnnnnnnnnnnnnnnnnnnnnnnnnnnnnnnnnnnnnnnnnnnnnnnnnnnnnnnnnnnnnnnnnnnnnnnnnnnnnnnnnnnnnnnnnnnnnnnnnnnnnnnnnnnnnnnnnnnnnnnnnnnnnnnnnnnnnnnnnnnnnnnnnnnnnnnnnnnnnnnnnnnnnnnnnnnnnnnnnnnnnnnnnnnnnnnnnnnnnnnnnnnnnnnnnnnnnnnnnnnnnnnnnnnnnnnnnnnnnnnnnnnnnnnnnnnnnnnnnnnnnnnnnnnnnnnnnnnnnnnnnnnnnnnnnnnnnnnnnnnnnnnnnnnnnnnnnnnnnnnnnnnnnnnnnnnnnnnnnnnnnnnnnnnnnnnnnnnnnnnnnnnnnnnnnnnnnnnnnnnnnnnnnnnnnnnnnnnnnnnnnnnnnnnnnnnnnnnnnnnnnnnnnnnnnnnnnnnnnnnnnnnnnnnnnnnnnnnnnnnnnnnnnnnnnnnnnnnnnnnnnnnnnnnnnnnnnnnnnnnnnnnnnnnnnnnnnnnnnnnnnnnnnnnnnnnnnnnnnnnnnnnnnnnnnnnnnnnnnnnnnnnnnnnnnnnnnnnnnnnnnnnnnnnnnnnnnnnnnnnnnnnnnnnnnnnnnnnnnnnnnnnnnnnnnnnnnnnnnnnnnnnnnnnnnnnnnnnnnnnnnnnnnnnnnnnnnnnnnnnnnnnnnnnnnnnnnnnnnnnnnnnnnnnnnnnnnnnnnnnnnnnnnnnnnnnnnnnnnnnnnnnnnnnnnnnnnnnnnnnnnnnnnnnnnnnnnnnnnnnnnnnnnnnnnnnnnnnnnnnnnnnnnnnnnnnnnnnnnnnnnnnnnnnnnnnnnnnnnnnnnnnnnnnnnnnnnnnnnnnnnnnnnnnnnnnnnnnnnnnnnnnnnnnnnnnnnnnnnnnnnnnnnnnnnnnnnnnnnnnnnnnnnnnnnnnnnnnnnnnnnnnnnnnnnnnnnnnnnnnnnnnnnnnnnnnnnnnnnnnnnnnnnnnnnnnnnnnnnnnnnnnnnnnnnnnnnnnnnnnnnnnnnnnnnnnnnnnnnnnnnnnnnnnnnnnnnnnnnnnnnnnnnnnnnnnnnnnnnnnnnnnnnnnnnnnnnnnnnnnnnnnnnnnnnnnnnnnnnnnnnnnnnnnnnnnnnnnnnnnnnnnnnnnnnnnnnnnnnnnnnnnnnnnnnnnnnnnnnnnnnnnnnnnnnnnnnnnnnnnnnnnnnnnnnnnnnnnnnnnnnnnnnnnnnnnnnnnnnnnnnnnnnnnnnnnnnnnnnnnnnnnnnnnnnnnnnnnnnnnnnnnnnnnnnnnnnnnnnnnnnnnnnnnnnnnnnnnnnnnnnnnnnnnnnnnnnnnnnnnnnnnnnnnnnnnnnnnnnnnnnnnnnnnnnnnnnnnnnnnnnnnnnnnnnnnnnnnnnnnnnnnnnnnnnnnnnnnnnnnnnnnnnnnnnnnnnnnnnnnnnnnnnnnnnnnnnnnnnnnnnnnnnnnnnnnnnnnnnnnnnnnnnnnnnnnnnnnnnnnnnnnnnnnnnnnnnnnnnnnnnnnnnnnnnnnnnnnnnnnnnnnnnnnnnnnnnnnnnnnnnnnnnnnnnnnnnnnnnnnnnnnnnnnnnnnnnnnnnnnnnnnnnnnnnnnnnnnnnnnnnnnnnnnnnnnnnnnnnnnnnnnnnnnnnnnnnnnnnnnnnnnnnnnnnnnnnnnnnnnnnnnnnnnnnnnnnnnnnnnnnnnnnnnnnnnnnnnnnnnnnnnnnnnnnnnnnnnnnnnnnnnnnnnnnnnnnnnnnnnnnnnnnnnnnnnnnnnnnnnnnnnnnnnnnnnnnnnnnnnnnnnnnnnnnnnnnnnnnnnnnnnnnnnnnnnnnnnnnnnnnnnnnnnnnnnnnnnnnnnnnnnnnnnnnnnnnnnnnnnnnnnnnnnnnnnnnnnnnnnnnnnnnnnnnnnnnnnnnnnnnnnnnnnnnnnnnnnnnnnnnnnnnnnnnnnnnnnnnnnnnnnnnnnnnnnnnnnnnnnnnnnnnnnnnnnnnnnnnnnnnnnnnnnnnnnnnnnnnnnnnnnnnnnnnnnnnnnnnnnnnnnnnnnnnnnnnnnnnnnnnnnnnnnnnnnnnnnnnnnnnnnnnnnnnnnnnnnnnnnnnnnnnnnnnnnnnnnnnnnnnnnnnnnnnnnnnnnnnnnnnnnnnnnnnnnnnnnnnnnnnnnnnnnnnnnnnnnnnnnnnnnnnnnnnnnnnnnnnnnnnnnnnnnnnnnnnnnnnnnnnnnnnnnnnnnnnnnnnnnnnnnnnnnnnnnnnnnnnnnnnnnnnnnnnnnnnnnnnnnnnnnnnnnnnnnnnnnnnnnnnnnnnnnnnnnnnnnnnnnnnnnnnnnnnnnnnnnnnnnnnnnnnnnnnnnnnnnnnnnnnnnnnnnnnnnnnnnnnnnnnnnnnnnnnnnnnnnnnnnnnnnnnnnnnnnnnnnnnnnnnnnnnnnnnnnnnnnnnnnnnnnnnnnnnnnnnnnnnnnnnnnnnnnnnnnnnnnnnnnnnnnnnnnnnnnnnnnnnnnnnnnnnnnnnnnnnnnnnnnnnnnnnnnnnnnnnnnnnnnnnnnnnnnnnnnnnnnnnnnnnnnnnnnnnnnnnnnnnnnnnnnnnnnnnnnnnnnnnnnnnnnnnnnnnnnnnnnnnnnnnnnnnnnnnnnnnnnnnnnnnnnnnnnnnnnnnnnnnnnnnnnnnnnnnnnnnnnnnnnnnnnnnnnnnnnnnnnnnnnnnnnnnnnnnnnnnnnnnnnnnnnnnnnnnnnnnnnnnnnnnnnnnnnnnnnnnnnnnnnnnnnnnnnnnnnnnnnnnnnnnnnnnnnnnnnnnnnnnnnnnnnnnnnnnnnnnnnnnnnnnnnnnnnnnnnnnnnnnnnnnnnnnnnnnnnnnnnnnnnnnnnnnnnnnnnnnnnnnnnnnnnnnnnnnnnnnnnnnnnnnnnnnnnnnnnnnnnnnnnnnnnnnnnnnnnnnnnnnnnnnnnnnnnnnnnnnnnnnnnnnnnnnnnnnnnnnnnnnnnnnnnnnnnnnnnnnnnnnnnnnnnnnnnnnnnnnnnnnnnnnnnnnnnnnnnnnnnnnnnnnnnnnnnnnnnnnnnnnnnnnnnnnnnnnnnnnnnnnnnnnnnnnnnnnnnnnnnnnnnnnnnnnnnnnnnnnnnnnnnnnnnnnnnnnnnnnnnnnnnnnnnnnnnnnnnnnnnnnnnnnnnnnnnnnnnnnnnnnnnnnnnnnnnnnnnnnnnnnnnnnnnnnnnnnnnnnnnnnnnnnnnnnnnnnnnnnnnnnnnnnnnnnnnnnnnnnnnnnnnnnnnnnnnnnnnnnnnnnnnnnnnnnnnnnnnnnnnnnnnnnnnnnnnnnnnnnnnnnnnnnnnnnnnnnnnnnnnnnnnnnnnnnnnnnnnnnnnnnnnnnnnnnnnnnnnnnnnnnnnnnnnnnnnnnnnnnnnnnnnnnnnnnnnnnnnnnnnnnnnnnnnnnnnnnnnnnnnnnnnnnnnnnnnnnnnnnnnnnnnnnnnnnnnnnnnnnnnnnnnnnnnnnnnnnnnnnnnnnnnnnnnnnnnnnnnnnnnnnnnnnnnnnnnnnnnnnnnnnnnnnnnnnnnnnnnnnnnnnnnnnnnnnnnnnnnnnnnnnnnnnnnnnnnnnnnnnnnnnnnnnnnnnnnnnnnnnnnnnnnnnnnnnnnnnnnnnnnnnnnnnnnnnnnnnnnnnnnnnnnnnnnnnnnnnnnnnnnnnnnnnnnnnnnnnnnnnnnnnnnnnnnnnnnnnnnnnnnnnnnnnnnnnnnnnnnnnnnnnnnnnnnnnnnnnnnnnnnnnnnnnnnnnnnnnnnnnnnnnnnnnnnnnnnnnnnnnnnnnnnnnnnnnnnnnnnnnnnnnnnnnnnnnnnnnnnnnnnnnnnnnnnnnnnnnnnnnnnnnnnnnnnnnnnnnnnnnnnnnnnnnnnnnnnnnnnnnnnnnnnnnnnnnnnnnnnnnnnnnnnnnnnnnnnnnnnnnnnnnnnnnnnnnnnnnnnnnnnnnnnnnnnnnnnnnnnnnnnnnnnnnnnnnnnnnnnnnnnnnnnnnnnnnnnnnnnnnnnnnnnnnnnnnnnnnnnnnnnnnnnnnnnnnnnnnnnnnnnnnnnnnnnnnnnnnnnnnnnnnnnnnnnnnnnnnnnnnnnnnnnnnnnnnnnnnnnnnnnnnnnnnnnnnnnnnnnnnnnnnnnnnnnnnnnnnnnnnnnnnnnnnnnnnnnnnnnnnnnnnnnnnnnnnnnnnnnnnnnnnnnnnnnnnnnnnnnnnnnnnnnnnnnnnnnnnnnnnnnnnnnnnnnnnnnnnnnnnnnnnnnnnnnnnnnnnnnnnnnnnnnnnnnnnnnnnnnnnnnnnnnnnnnnnnnnnnnnnnnnnnnnnnnnnnnnnnnnnnnnnnnnnnnnnnnnnnnnnnnnnnnnnnnnnnnnnnnnnnnnnnnnnnnnnnnnnnnnnnnnnnnnnnnnnnnnnnnnnnnnnnnnnnnnnnnnnnnnnnnnnnnnnnnnnnnnnnnnnnnnnnnnnnnnnnnnnnnnnnnnnnnnnnnnnnnnnnnnnnnnnnnnnnnnnnnnnnnnnnnnnnnnnnnnnnnnnnnnnnnnnnnnnnnnnnnnnnnnnnnnnnnnnnnnnnnnnnnnnnnnnnnnnnnnnnnnnnnnnnnnnnnnnnnnnnnnnnnnnnnnnnnnnnnnnnnnnnnnnnnnnnnnnnnnnnnnnnnnnnnnnnnnnnnnnnnnnnnnnnnnnnnnnnnnnnnnnnnnnnnnnnnnnnnnnnnnnnnnnnnnnnnnnnnnnnnnnnnnnnnnnnnnnnnnnnnnnnnnnnnnnnnnnnnnnnnnnnnnnnnnnnnnnnnnnnnnnnnnnnnnnnnnnnnnnnnnnnnnnnnnnnnnnnnnnnnnnnnnnnnnnnnnnnnnnnnnnnnnnnnnnnnnnnnnnnnnnnnnnnnnnnnnnnnnnnnnnnnnnnnnnnnnnnnnnnnnnnnnnnnnnnnnnnnnnnnnnnnnnnnnnnnnnnnnnnnnnnnnnnnnnnnnnnnnnnnnnnnnnnnnnnnnnnnnnnnnnnnnnnnnnnnnnnnnnnnnnnnnnnnnnnnnnnnnnnnnnnnnnnnnnnnnnnnnnnnnnnnnnnnnnnnnnnnnnnnnnnnnnnnnnnnnnnnnnnnnnnnnnnnnnnnnnnnnnnnnnnnnnnnnnnnnnnnnnnnnnnnnnnnnnnnnnnnnnnnnnnnnnnnnnnnnnnnnnnnnnnnnnnnnnnnnnnnnnnnnnnnnnnnnnnnnnnnnnnnnnnnnnnnnnnnnnnnnnnnnnnnnnnnnnnnnnnnnnnnnnnnnnnnnnnnnnnnnnnnnnnnnnnnnnnnnnnnnnnnnnnnnnnnnnnnnnnnnnnnnnnnnnnnnnnnnnnnnnnnnnnnnnnnnnnnnnnnnnnnnnnnnnnnnnnnnnnnnnnnnnnnnnnnnnnnnnnnnnnnnnnnnnnnnnnnnnnnnnnnnnnnnnnnnnnnnnnnnnnnnnnnnnnnnnnnnnnnnnnnnnnnnnnnnnnnnnnnnnnnnnnnnnnnnnnnnnnnnnnnnnnnnnnnnnnnnnnnnnnnnnnnnnnnnnnnnnnnnnnnnnnnnnnnnnnnnnnnnnnnnnnnnnnnnnnnnnnnnnnnnnnnnnnnnnnnnnnnnnnnnnnnnnnnnnnnnnnnnnnnnnnnnnnnnnnnnnnnnnnnnnnnnnnnnnnnnnnnnnnnnnnnnnnnnnnnnnnnnnnnnnnnnnnnnnnnnnnnnnnnnnnnnnnnnnnnnnnnnnnnnnnnnnnnnnnnnnnnnnnnnnnnnnnnnnnnnnnnnnnnnnnnnnnnnnnnnnnnnnnnnnnnnnnnnnnnnnnnnnnnnnnnnnnnnnnnnnnnnnnnnnnnnnnnnnnnnnnnnnnnnnnnnnnnnnnnnnnnnnnnnnnnnnnnnnnnnnnnnnnnnnnnnnnnnnnnnnnnnnnnnnnnnnnnnnnnnnnnnnnnnnnnnnnnnnnnnnnnnnnnnnnnnnnnnnnnnnnnnnnnnnnnnnnnnnnnnnnnnnnnnnnnnnnnnnnnnnnnnnnnnnnnnnnnnnnnnnnnnnnnnnnnnnnnnnnnnnnnnnnnnnnnnnnnnnnnnnnnnnnnnnnnnnnnnnnnnnnnnnnnnnnnnnnnnnnnnnnnnnnnnnnnnnnnnnnnnnnnnnnnnnnnnnnnnnnnnnnnnnnnnnnnnnnnnnnnnnnnnnnnnnnnnnnnnnnnnnnnnnnnnnnnnnnnnnnnnnnnnnnnnnnnnnnnnnnnnnnnnnnnnnnnnnnnnnnnnnnnnnnnnnnnnnnnnnnnnnnnnnnnnnnnnnnnnnnnnnnnnnnnnnnnnnnnnnnnnnnnnnnnnnnnnnnnnnnnnnnnnnnnnnnnnnnnnnnnnnnnnnnnnnnnnnnnnnnnnnnnnnnnnnnnnnnnnnnnnnnnnnnnnnnnnnnnnnnnnnnnnnnnnnnnnnnnnnnnnnnnnnnnnnnnnnnnnnnnnnnnnnnnnnnnnnnnnnnnnnnnnnnnnnnnnnnnnnnnnnnnnnnnnnnnnnnnnnnnnnnnnnnnnnnnnnnnnnnnnnnnnnnnnnnnnnnnnnnnnnnnnnnnnnnnnnnnnnnnnnnnnnnnnnnnnnnnnnnnnnnnnnnnnnnnnnnnnnnnnnnnnnnnnnnnnnnnnnnnnnnnnnnnnnnnnnnnnnnnnnnnnnnnnnnnnnnnnnnnnnnnnnnnnnnnnnnnnnnnnnnnnnnnnnnnnnnnnnnnnnnnnnnnnnnnnnnnnnnnnnnnnnnnnnnnnnnnnnnnnnnnnnnnnnnnnnnnnnnnnnnnnnnnnnnnnnnnnnnnnnnnnnnnnnnnnnnnnnnnnnnnnnnnnnnnnnnnnnnnnnnnnnnnnnnnnnnnnnnnnnnnnnnnnnnnnnnnnnnnnnnnnnnnnnnnnnnnnnnnnnnnnnnnnnnnnnnnnnnnnnnnnnnnnnnnnnnnnnnnnnnnnnnnnnnnnnnnnnnnnnnnnnnnnnnnnnnnnnnnnnnnnnnnnnnnnnnnnnnnnnnnnnnnnnnnnnnnnnnnnnnnnnnnnnnnnnnnnnnnnnnnnnnnnnnnnnnnnnnnnnnnnnnnnnnnnnnnnnnnnnnnnnnnnnnnnnnnnnnnnnnnnnnnnnnnnnnnnnnnnnnnnnnnnnnnnnnnnnnnnnnnnnnnnnnnnnnnnnnnnnnnnnnnnnnnnnnnnnnnnnnnnnnnnnnnnnnnnnnnnnnnnnnnnnnnnnnnnnnnnnnnnnnnnnnnnnnnnnnnnnnnnnnnnnnnnnnnnnnnnnnnnnnnnnnnnnnnnnnnnnnnnnnnnnnnnnnnnnnnnnnnnnnnnnnnnnnnnnnnnnnnnnnnnnnnnnnnnnnnnnnnnnnnnnnnnnnnnnnnnnnnnnnnnnnnnnnnnnnnnnnnnnnnnnnnnnnnnnnnnnnnnnnnnnnnnnnnnnnnnnnnnnnnnnnnnnnnnnnnnnnnnnnnnnnnnnnnnnnnnnnnnnnnnnnnnnnnnnnnnnnnnnnnnnnnnnnnnnnnnnnnnnnnnnnnnnnnnnnnnnnnnnnnnnnnnnnnnnnnnnnnnnnnnnnnnnnnnnnnnnnnnnnnnnnnnnnnnnnnnnnnnnnnnnnnnnnnnnnnnnnnnnnnnnnnnnnnnnnnnnnnnnnnnnnnnnnnnnnnnnnnnnnnnnnnnnnnnnnnnnnnnnnnnnnnnnnnnnnnnnnnnnnnnnnnnnnnnnnnnnnnnnnnnnnnnnnnnnnnnnnnnnnnnnnnnnnnnnnnnnnnnnnnnnnnnnnnnnnnnnnnnnnnnnnnnnnnnnnnnnnnnnnnnnnnnnnnnnnnnnnnnnnnnnnnnnnnnnnnnnnnnnnnnnnnnnnnnnnnnnnnnnnnnnnnnnnnnnnnnnnnnnnnnnnnnnnnnnnnnnnnnnnnnnnnnnnnnnnnnnnnnnnnnnnnnnnnnnnnnnnnnnnnnnnnnnnnnnnnnnnnnnnnnnnnnnnnnnnnnnnnnnnnnnnnnnnnnnnnnnnnnnnnnnnnnnnnnnnnnnnnnnnnnnnnnnnnnnnnnnnnnnnnnnnnnnnnnnnnnnnnnnnnnnnnnnnnnnnnnnnnnnnnnnnnnnnnnnnnnnnnnnnnnnnnnnnnnnnnnnnnnnnnnnnnnnnnnnnnnnnnnnnnnnnnnnnnnnnnnnnnnnnnnnnnnnnnnnnnnnnnnnnnnnnnnnnnnnnnnnnnnnnnnnnnnnnnnnnnnnnnnnnnnnnnnnnnnnnnnnnnnnnnnnnnnnnnnnnnnnnnnnnnnnnnnnnnnnnnnnnnnnnnnnnnnnnnnnnnnnnnnnnnnnnnnnnnnnnnnnnnnnnnnnnnnnnnnnnnnnnnnnnnnnnnnnnnnnnnnnnnnnnnnnnnnnnnnnnnnnnnnnnnnnnnnnnnnnnnnnnnnnnnnnnnnnnnnnnnnnnnnnnnnnnnnnnnnnnnnnnnnnnnnnnnnnnnnnnnnnnnnnnnnnnnnnnnnnnnnnnnnnnnnnnnnnnnnnnnnnnnnnnnnnnnnnnnnnnnnnnnnnnnnnnnnnnnnnnnnnnnnnnnnnnnnnnnnnnnnnnnnnnnnnnnnnnnnnnnnnnnnnnnnnnnnnnnnnnnnnnnnnnnnnnnnnnnnnnnnnnnnnnnnnnnnnnnnnnnnnnnnnnnnnnnnnnnnnnnnnnnnnnnnnnnnnnnnnnnnnnnnnnnnnnnnnnnnnnnnnnnnnnnnnnnnnnnnnnnnnnnnnnnnnnnnnnnnnnnnnnnnnnnnnnnnnnnnnnnnnnnnnnnnnnnnnnnnnnnnnnnnnnnnnnnnnnnnnnnnnnnnnnnnnnnnnnnnnnnnnnnnnnnnnnnnnnnnnnnnnnnnnnnnnnnnnnnnnnnnnnnnnnnnnnnnnnnnnnnnnnnnnnnnnnnnnnnnnnnnnnnnnnnnnnnnnnnnnnnnnnnnnnnnnnnnnnnnnnnnnnnnnnnnnnnnnnnnnnnnnnnnnnnnnnnnnnnnnnnnnnnnnnnnnnnnnnnnnnnnnnnnnnnnnnnnnnnnnnnnnnnnnnnnnnnnnnnnnnnnnnnnnnnnnnnnnnnnnnnnnnnnnnnnnnnnnnnnnnnnnnnnnnnnnnnnnnnnnnnnnnnnnnnnnnnnnnnnnnnnnnnnnnnnnnnnnnnnnnnnnnnnnnnnnnnnnnnnnnnnnnnnnnnnnnnnnnnnnnnnnnnnnnnnnnnnnnnnnnnnnnnnnnnnnnnnnnnnnnnnnnnnnnnnnnnnnnnnnnnnnnnnnnnnnnnnnnnnnnnnnnnnnnnnnnnnnnnnnnnnnnnnnnnnnnnnnnnnnnnnnnnnnnnnnnnnnnnnnnnnnnnnnnnnnnnnnnnnnnnnnnnnnnnnnnnnnnnnnnnnnnnnnnnnnnnnnnnnnnnnnnnnnnnnnnnnnnnnnnnnnnnnnnnnnnnnnnnnnnnnnnnnnnnnnnnnnnnnnnnnnnnnnnnnnnnnnnnnnnnnnnnnnnnnnnnnnnnnnnnnnnnnnnnnnnnnnnnnnnnnnnnnnnnnnnnnnnnnnnnnnnnnnnnnnnnnnnnnnnnnnnnnnnnnnnnnnnnnnnnnnnnnnnnnnnnnnnnnnnnnnnnnnnnnnnnnnnnnnnnnnnnnnnnnnnnnnnnnnnnnnnnnnnnnnnnnnnnnnnnnnnnnnnnnnnnnnnnnnnnnnnnnnnnnnnnnnnnnnnnnnnnnnnnnnnnnnnnnnnnnnnnnnnnnnnnnnnnnnnnnnnnnnnnnnnnnnnnnnnnnnnnnnnnnnnnnnnnnnnnnnnnnnnnnnnnnnnnnnnnnnnnnnnnnnnnnnnnnnnnnnnnnnnnnnnnnnnnnnnnnnnnnnnnnnnnnnnnnnnnnnnnnnnnnnnnnnnnnnnnnnnnnnnnnnnnnnnnnnnnnnnnnnnnnnnnnnnnnnnnnnnnnnnnnnnnnnnnnnnnnnnnnnnnnnnnnnnnnnnnnnnnnnnnnnnnnnnnnnnnnnnnnnnnnnnnnnnnnnnnnnnnnnnnnnnnnnnnnnnnnnnnnnnnnnnnnnnnnnnnnnnnnnnnnnnnnnnnnnnnnnnnnnnnnnnnnnnnnnnnnnnnnnnnnnnnnnnnnnnnnnnnnnnnnnnnnnnnnnnnnnnnnnnnnnnnnnnnnnnnnnnnnnnnnnnnnnnnnnnnnnnnnnnnnnnnnnnnnnnnnnnnnnnnnnnnnnnnnnnnnnnnnnnnnnnnnnnnnnnnnnnnnnnnnnnnnnnnnnnnnnnnnnnnnnnnnnnnnnnnnnnnnnnnnnnnnnnnnnnnnnnnnnnnnnnnnnnnnnnnnnnnnnnnnnnnnnnnnnnnnnnnnnnnnnnnnnnnnnnnnnnnnnnnnnnnnnnnnnnnnnnnnnnnnnnnnnnnnnnnnnnnnnnnnnnnnnnnnnnnnnnnnnnnnnnnnnnnnnnnnnnnnnnnnnnnnnnnnnnnnnnnnnnnnnnnnnnnnnnnnnnnnnnnnnnnnnnnnnnnnnnnnnnnnnnnnnnnnnnnnnnnnnnnnnnnnnnnnnnnnnnnnnnnnnnnnnnnnnnnnnnnnnnnnnnnnnnnnnnnnnnnnnnnnnnnnnnnnnnnnnnnnnnnnnnnnnnnnnnnnnnnnnnnnnnnnnnnnnnnnnnnnnnnnnnnnnnnnnnnnnnnnnnnnnnnnnnnnnnnnnnnnnnnnnnnnnnnnnnnnnnnnnnnnnnnnnnnnnnnnnnnnnnnnnnnnnnnnnnnnnnnnnnnnnnnnnnnnnnnnnnnnnnnnnnnnnnnnnnnnnnnnnnnnnnnnnnnnnnnnnnnnnnnnnnnnnnnnnnnnnnnnnnnnnnnnnnnnnnnnnnnnnnnnnnnnnnnnnnnnnnnnnnnnnnnnnnnnnnnnnnnnnnnnnnnnnnnnnnnnnnnnnnnnnnnnnnnnnnnnnnnnnnnnnnnnnnnnnnnnnnnnnnnnnnnnnnnnnnnnnnnnnnnnnnnnnnnnnnnnnnnnnnnnnnnnnnnnnnnnnnnnnnnnnnnnnnnnnnnnnnnnnnnnnnnnnnnnnnnnnnnnnnnnnnnnnnnnnnnnnnnnnnnnnnnnnnnnnnnnnnnnnnnnnnnnnnnnnnnnnnnnnnnnnnnnnnnnnnnnnnnnnnnnnnnnnnnnnnnnnnnnnnnnnnnnnnnnnnnnnnnnnnnnnnnnnnnnnnnnnnnnnnnnnnnnnnnnnnnnnnnnnnnnnnnnnnnnnnnnnnnnnnnnnnnnnnnnnnnnnnnnnnnnnnnnnnnnnnnnnnnnnnnnnnnnnnnnnnnnnnnnnnnnnnnnnnnnnnnnnnnnnnnnnnnnnnnnnnnnnnnnnnnnnnnnnnnnnnnnnnnnnnnnnnnnnnnnnnnnnnnnnnnnnnnnnnnnnnnnnnnnnnnnnnnnnnnnnnnnnnnnnnnnnnnnnnnnnnnnnnnnnnnnnnnnnnnnnnnnnnnnnnnnnnnnnnnnnnnnnnnnnnnnnnnnnnnnnnnnnnnnnnnnnnnnnnnnnnnnnnnnnnnnnnnnnnnnnnnnnnnnnnnnnnnnnnnnnnnnnnnnnnnnnnnnnnnnnnnnnnnnnnnnnnnnnnnnnnnnnnnnnnnnnnnnnnnnnnnnnnnnnnnnnnnnnnnnnnnnnnnnnnnnnnnnnnnnnnnnnnnnnnnnnnnnnnnnnnnnnnnnnnnnnnnnnnnnnnnnnnnnnnnnnnnnnnnnnnnnnnnnnnnnnnnnnnnnnnnnnnnnnnnnnnnnnnnnnnnnnnnnnnnnnnnnnnnnnnnnnnnnnnnnnnnnnnnnnnnnnnnnnnnnnnnnnnnnnnnnnnnnnnnnnnnnnnnnnnnnnnnnnnnnnnnnnnnnnnnnnnnnnnnnnnnnnnnnnnnnnnnnnnnnnnnnnnnnnnnnnnnnnnnnnnnnnnnnnnnnnnnnnnnnnnnnnnnnnnnnnnnnnnnnnnnnnnnnnnnnnnnnnnnnnnnnnnnnnnnnnnnnnnnnnnnnnnnnnnnnnnnnnnnnnnnnnnnnnnnnnnnnnnnnnnnnnnnnnnnnnnnnnnnnnnnnnnnnnnnnnnnnnnnnnnnnnnnnnnnnnnnnnnnnnnnnnnnnnnnnnnnnnnnnnnnnnnnnnnnnnnnnnnnnnnnnnnnnnnnnnnnnnnnnnnnnnnnnnnnnnnnnnnnnnnnnnnnnnnnnnnnnnnnnnnnnnnnnnnnnnnnnnnnnnnnnnnnnnnnnnnnnnnnnnnnnnnnnnnnnnnnnnnnnnnnnnnnnnnnnnnnnnnnnnnnnnnnnnnnnnnnnnnnnnnnnnnnnnnnnnnnnnnnnnnnnnnnnnnnnnnnnnnnnnnnnnnnnnnnnnnnnnnnnnnnnnnnnnnnnnnnnnnnnnnnnnnnnnnnnnnnnnnnnnnnnnnnnnnnnnnnnnnnnnnnnnnnnnnnnnnnnnnnnnnnnnnnnnnnnnnnnnnnnnnnnnnnnnnnnnnnnnnnnnnnnnnnnnnnnnnnnnnnnnnnnnnnnnnnnnnnnnnnnnnnnnnnnnnnnnnnnnnnnnnnnnnnnnnnnnnnnnnnnnnnnnnnnnnnnnnnnnnnnnnnnnnnnnnnnnnnnnnnnnnnnnnnnnnnnnnnnnnnnnnnnnnnnnnnnnnnnnnnnnnnnnnnnnnnnnnnnnnnnnnnnnnnnnnnnnnnnnnnnnnnnnnnnnnnnnnnnnnnnnnnnnnnnnnnnnnnnnnnnnnnnnnnnnnnnnnnnnnnnnnnnnnnnnnnnnnnnnnnnnnnnnnnnnnnnnnnnnnnnnnnnnnnnnnnnnnnnnnnnnnnnnnnnnnnnnnnnnnnnnnnnnnnnnnnnnnnnnnnnnnnnnnnnnnnnnnnnnnnnnnnnnnnnnnnnnnnnnnnnnnnnnnnnnnnnnnnnnnnnnnnnnnnnnnnnnnnnnnnnnnnnnnnnnnnnnnnnnnnnnnnnnnnnnnnnnnnnnnnnnnnnnnnnnnnnnnnnnnnnnnnnnnnnnnnnnnnnnnnnnnnnnnnnnnnnnnnnnnnnnnnnnnnnnnnnnnnnnnnnnnnnnnnnnnnnnnnnnnnnnnnnnnnnnnnnnnnnnnnnnnnnnnnnnnnnnnnnnnnnnnnnnnnnnnnnnnnnnnnnnnnnnnnnnnnnnnnnnnnnnnnnnnnnnnnnnnnnnnnnnnnnnnnnnnnnnnnnnnnnnnnnnnnnnnnnnnnnnnnnnnnnnnnnnnnnnnnnnnnnnnnnnnnnnnnnnnnnnnnnnnnnnnnnnnnnnnnnnnnnnnnnnnnnnnnnnnnnnnnnnnnnnnnnnnnnnnnnnnnnnnnnnnnnnnnnnnnnnnnnnnnnnnnnnnnnnnnnnnnnnnnnnnnnnnnnnnnnnnnnnnnnnnnnnnnnnnnnnnnnnnnnnnnnnnnnnnnnnnnnnnnnnnnnnnnnnnnnnnnnnnnnnnnnnnnnnnnnnnnnnnnnnnnnnnnnnnnnnnnnnnnnnnnnnnnnnnnnnnnnnnnnnnnnnnnnnnnnnnnnnnnnnnnnnnnnnnnnnnnnnnnnnnnnnnnnnnnnnnnnnnnnnnnnnnnnnnnnnnnnnnnnnnnnnnnnnnnnnnnnnnnnnnnnnnnnnnnnnnnnnnnnnnnnnnnnnnnnnnnnnnnnnnnnnnnnnnnnnnnnnnnnnnnnnnnnnnnnnnnnnnnnnnnnnnnnnnnnnnnnnnnnnnnnnnnnnnnnnnnnnnnnnnnnnnnnnnnnnnnnnnnnnnnnnnnnnnnnnnnnnnnnnnnnnnnnnnnnnnnnnnnnnnnnnnnnnnnnnnnnnnnnnnnnnnnnnnnnnnnnnnnnnnnnnnnnnnnnnnnnnnnnnnnnnnnnnnnnnnnnnnnnnnnnnnnnnnnnnnnnnnnnnnnnnnnnnnnnnnnnnnnnnnnnnnnnnnnnnnnnnnnnnnnnnnnnnnnnnnnnnnnnnnnnnnnnnnnnnnnnnnnnnnnnnnnnnnnnnnnnnnnnnnnnnnnnnnnnnnnnnnnnnnnnnnnnnnnnnnnnnnnnnnnnnnnnnnnnnnnnnnnnnnnnnnnnnnnnnnnnnnnnnnnnnnnnnnnnnnnnnnnnnnnnnnnnnnnnnnnnnnnnnnnnnnnnnnnnnnnnnnnnnnnnnnnnnnnnnnnnnnnnnnnnnnnnnnnnnnnnnnnnnnnnnnnnnnnnnnnnnnnnnnnnnnnnnnnnnnnnnnnnnnnnnnnnnnnnnnnnnnnnnnnnnnnnnnnnnnnnnnnnnnnnnnnnnnnnnnnnnnnnnnnnnnnnnnnnnnnnnnnnnnnnnnnnnnnnnnnnnnnnnnnnnnnnnnnnnnnnnnnnnnnnnnnnnnnnnnnnnnnnnnnnnnnnnnnnnnnnnnnnnnnnnnnnnnnnnnnnnnnnnnnnnnnnnnnnnnnnnnnnnnnnnnnnnnnnnnnnnnnnnnnnnnnnnnnnnnnnnnnnnnnnnnnnnnnnnnnnnnnnnnnnnnnnnnnnnnnnnnnnnnnnnnnnnnnnnnnnnnnnnnnnnnnnnnnnnnnnnnnnnnnnnnnnnnnnnnnnnnnnnnnnnnnnnnnnnnnnnnnnnnnnnnnnnnnnnnnnnnnnnnnnnnnnnnnnnnnnnnnnnnnnnnnnnnnnnnnnnnnnnnnnnnnnnnnnnnnnnnnnnnnnnnnnnnnnnnnnnnnnnnnnnnnnnnnnnnnnnnnnnnnnnnnnnnnnnnnnnnnnnnnnnnnnnnnnnnnnnnnnnnnnnnnnnnnnnnnnnnnnnnnnnnnnnnnnnnnnnnnnnnnnnnnnnnnnnnnnnnnnnnnnnnnnnnnnnnnnnnnnnnnnnnnnnnnnnnnnnnnnnnnnnnnnnnnnnnnnnnnnnnnnnnnnnnnnnnnnnnnnnnnnnnnnnnnnnnnnnnnnnnnnnnnnnnnnnnnnnnnnnnnnnnnnnnnnnnnnnnnnnnnnnnnnnnnnnnnnnnnnnnnnnnnnnnnnnnnnnnnnnnnnnnnnnnnnnnnnnnnnnnnnnnnnnnnnnnnnnnnnnnnnnnnnnnnnnnnnnnnnnnnnnnnnnnnnnnnnnnnnnnnnnnnnnnnnnnnnnnnnnnnnnnnnnnnnnnnnnnnnnnnnnnnnnnnnnnnnnnnnnnnnnnnnnnnnnnnnnnnnnnnnnnnnnnnnnnnnnnnnnnnnnnnnnnnnnnnnnnnnnnnnnnnnnnnnnnnnnnnnnnnnnnnnnnnnnnnnnnnnnnnnnnnnnnnnnnnnnnnnnnnnnnnnnnnnnnnnnnnnnnnnnnnnnnnnnnnnnnnnnnnnnnnnnnnnnnnnnnnnnnnnnnnnnnnnnnnnnnnnnnnnnnnnnnnnnnnnnnnnnnnnnnnnnnnnnnnnnnnnnnnnnnnnnnnnnnnnnnnnnnnnnnnnnnnnnnnnnnnnnnnnnnnnnnnnnnnnnnnnnnnnnnnnnnnnnnnnnnnnnnnnnnnnnnnnnnnnnnnnnnnnnnnnnnnnnnnnnnnnnnnnnnnnnnnnnnnnnnnnnnnnnnnnnnnnnnnnnnnnnnnnnnnnnnnnnnnnnnnnnnnnnnnnnnnnnnnnnnnnnnnnnnnnnnnnnnnnnnnnnnnnnnnnnnnnnnnnnnnnnnnnnnnnnnnnnnnnnnnnnnnnnnnnnnnnnnnnnnnnnnnnnnnnnnnnnnnnnnnnnnnnnnnnnnnnnnnnnnnnnnnnnnnnnnnnnnnnnnnnnnnnnnnnnnnnnnnnnnnnnnnnnnnnnnnnnnnnnnnnnnnnnnnnnnnnnnnnnnnnnnnnnnnnnnnnnnnnnnnnnnnnnnnnnnnnnnnnnnnnnnnnnnnnnnnnnnnnnnnnnnnnnnnnnnnnnnnnnnnnnnnnnnnnnnnnnnnnnnnnnnnnnnnnnnnnnnnnnnnnnnnnnnnnnnnnnnnnnnnnnnnnnnnnnnnnnnnnnnnnnnnnnnnnnnnnnnnnnnnnnnnnnnnnnnnnnnnnnnnnnnnnnnnnnnnnnnnnnnnnnnnnnnnnnnnnnnnnnnnnnnnnnnnnnnnnnnnnnnnnnnnnnnnnnnnnnnnnnnnnnnnnnnnnnnnnnnnnnnnnnnnnnnnnnnnnnnnnnnnnnnnnnnnnnnnnnnnnnnnnnnnnnnnnnnnnnnnnnnnnnnnnnnnnnnnnnnnnnnnnnnnnnnnnnnnnnnnnnnnnnnnnnnnnnnnnnnnnnnnnnnnnnnnnnnnnnnnnnnnnnnnnnnnnnnnnnnnnnnnnnnnnnnnnnnnnnnnnnnnnnnnnnnnnnnnnnnnnnnnnnnnnnnnnnnnnnnnnnnnnnnnnnnnnnnnnnnnnnnnnnnnnnnnnnnnnnnnnnnnnnnnnnnnnnnnnnnnnnnnnnnnnnnnnnnnnnnnnnnnnnnnnnnnnnnnnnnnnnnnnnnnnnnnnnnnnnnnnnnnnnnnnnnnnnnnnnnnnnnnnnnnnnnnnnnnnnnnnnnnnnnnnnnnnnnnnnnnnnnnnnnnnnnnnnnnnnnnnnnnnnnnnnnnnnnnnnnnnnnnnnnnnnnnnnnnnnnnnnnnnnnnnnnnnnnnnnnnnnnnnnnnnnnnnnnnnnnnnnnnnnnnnnnnnnnnnnnnnnnnnnnnnnnnnnnnnnnnnnnnnnnnnnnnnnnnnnnnnnnnnnnnnnnnnnnnnnnnnnnnnnnnnnnnnnnnnnnnnnnnnnnnnnnnnnnnnnnnnnnnnnnnnnnnnnnnnnnnnnnnnnnnnnnnnnnnnnnnnnnnnnnnnnnnnnnnnnnnnnnnnnnnnnnnnnnnnnnnnnnnnnnnnnnnnnnnnnnnnnnnnnnnnnnnnnnnnnnnnnnnnnnnnnnnnnnnnnnnnnnnnnnnnnnnnnnnnnnnnnnnnnnnnnnnnnnnnnnnnnnnnnnnnnnnnnnnnnnnnnnnnnnnnnnnnnnnnnnnnnnnnnnnnnnnnnnnnnnnnnnnnnnnnnnnnnnnnnnnnnnnnnnnnnnnnnnnnnnnnnnnnnnnnnnnnnnnnnnnnnnnnnnnnnnnnnnnnnnnnnnnnnnnnnnnnnnnnnnnnnnnnnnnnnnnnnnnnnnnnnnnnnnnnnnnnnnnnnnnnnnnnnnnnnnnnnnnnnnnnnnnnnnnnnnnnnnnnnnnnnnnnnnnnnnnnnnnnnnnnnnnnnnnnnnnnnnnnnnnnnnnnnnnnnnnnnnnnnnnnnnnnnnnnnnnnnnnnnnnnnnnnnnnnnnnnnnnnnnnnnnnnnnnnnnnnnnnnnnnnnnnnnnnnnnnnnnnnnnnnnnnnnnnnnnnnnnnnnnnnnnnnnnnnnnnnnnnnnnnnnnnnnnnnnnnnnnnnnnnnnnnnnnnnnnnnnnnnnnnnnnnnnnnnnnnnnnnnnnnnnnnnnnnnnnnnnnnnnnnnnnnnnnnnnnnnnnnnnnnnnnnnnnnnnnnnnnnnnnnnnnnnnnnnnnnnnnnnnnnnnnnnnnnnnnnnnnnnnnnnnnnnnnnnnnnnnnnnnnnnnnnnnnnnnnnnnnnnnnnnnnnnnnnnnnnnnnnnnnnnnnnnnnnnnnnnnnnnnnnnnnnnnnnnnnnnnnnnnnnnnnnnnnnnnnnnnnnnnnnnnnnnnnnnnnnnnnnnnnnnnnnnnnnnnnnnnnnnnnnnnnnnnnnnnnnnnnnnnnnnnnnnnnnnnnnnnnnnnnnnnnnnnnnnnnnnnnnnnnnnnnnnnnnnnnnnnnnnnnnnnnnnnnnnnnnnnnnnnnnnnnnnnnnnnnnnnnnnnnnnnnnnnnnnnnnnnnnnnnnnnnnnnnnnnnnnnnnnnnnnnnnnnnnnnnnnnnnnnnnnnnnnnnnnnnnnnnnnnnnnnnnnnnnnnnnnnnnnnnnnnnnnnnnnnnnnnnnnnnnnnnnnnnnnnnnnnnnnnnnnnnnnnnnnnnnnnnnnnnnnnnnnnnnnnnnnnnnnnnnnnnnnnnnnnnnnnnnnnnnnnnnnnnnnnnnnnnnnnnnnnnnnnnnnnnnnnnnnnnnnnnnnnnnnnnnnnnnnnnnnnnnnnnnnnnnnnnnnnnnnnnnnnnnnnnnnnnnnnnnnnnnnnnnnnnnnnnnnnnnnnnnnnnnnnnnnnnnnnnnnnnnnnnnnnnnnnnnnnnnnnnnnnnnnnnnnnnnnnnnnnnnnnnnnnnnnnnnnnnnnnnnnnnnnnnnnnnnnnnnnnnnnnnnnnnnnnnnnnnnnnnnnnnnnnnnnnnnnnnnnnnnnnnnnnnnnnnnnnnnnnnnnnnnnnnnnnnnnnnnnnnnnnnnnnnnnnnnnnnnnnnnnnnnnnnnnnnnnnnnnnnnnnnnnnnnnnnnnnnnnnnnnnnnnnnnnnnnnnnnnnnnnnnnnnnnnnnnnnnnnnnnnnnnnnnnnnnnnnnnnnnnnnnnnnnnnnnnnnnnnnnnnnnnnnnnnnnnnnnnnnnnnnnnnnnnnnnnnnnnnnnnnnnnnnnnnnnnnnnnnnnnnnnnnnnnnnnnnnnnnnnnnnnnnnnnnnnnnnnnnnnnnnnnnnnnnnnnnnnnnnnnnnnnnnnnnnnnnnnnnnnnnnnnnnnnnnnnnnnnnnnnnnnnnnnnnnnnnnnnnnnnnnnnnnnnnnnnnnnnnnnnnnnnnnnnnnnnnnnnnnnnnnnnnnnnnnnnnnnnnnnnnnnnnnnnnnnnnnnnnnnnnnnnnnnnnnnnnnnnnnnnnnnnnnnnnnnnnnnnnnnnnnnnnnnnnnnnnnnnnnnnnnnnnnnnnnnnnnnnnnnnnnnnnnnnnnnnnnnnnnnnnnnnnnnnnnnnnnnnnnnnnnnnnnnnnnnnnnnnnnnnnnnnnnnnnnnnnnnnnnnnnnnnnnnnnnnnnnnnnnnnnnnnnnnnnnnnnnnnnnnnnnnnnnnnnnnnnnnnnnnnnnnnnnnnnnnnnnnnnnnnnnnnnnnnnnnnnnnnnnnnnnnnnnnnnnnnnnnnnnnnnnnnnnnnnnnnnnnnnnnnnnnnnnnnnnnnnnnnnnnnnnnnnnnnnnnnnnnnnnnnnnnnnnnnnnnnnnnnnnnnnnnnnnnnnnnnnnnnnnnnnnnnnnnnnnnnnnnnnnnnnnnnnnnnnnnnnnnnnnnnnnnnnnnnnnnnnnnnnnnnnnnnnnnnnnnnnnnnnnnnnnnnnnnnnnnnnnnnnnnnnnnnnnnnnnnnnnnnnnnnnnnnnnnnnnnnnnnnnnnnnnnnnnnnnnnnnnnnnnnnnnnnnnnnnnnnnnnnnnnnnnnnnnnnnnnnnnnnnnnnnnnnnnnnnnnnnnnnnnnnnnnnnnnnnnnnnnnnnnnnnnnnnnnnnnnnnnnnnnnnnnnnnnnnnnnnnnnnnnnnnnnnnnnnnnnnnnnnnnnnnnnnnnnnnnnnnnnnnnnnnnnnnnnnnnnnnnnnnnnnnnnnnnnnnnnnnnnnnnnnnnnnnnnnnnnnnnnnnnnnnnnnnnnnnnnnnnnnnnnnnnnnnnnnnnnnnnnnnnnnnnnnnnnnnnnnnnnnnnnnnnnnnnnnnnnnnnnnnnnnnnnnnnnnnnnnnnnnnnnnnnnnnnnnnnnnnnnnnnnnnnnnnnnnnnnnnnnnnnnnnnnnnnnnnnnnnnnnnnnnnnnnnnnnnnnnnnnnnnnnnnnnnnnnnnnnnnnnnnnnnnnnnnnnnnnnnnnnnnnnnnnnnnnnnnnnnnnnnnnnnnnnnnnnnnnnnnnnnnnnnnnnnnnnnnnnnnnnnnnnnnnnnnnnnnnnnnnnnnnnnnnnnnnnnnnnnnnnnnnnnnnnnnnnnnnnnnnnnnnnnnnnnnnnnnnnnnnnnnnnnnnnnnnnnnnnnnnnnnnnnnnnnnnnnnnnnnnnnnnnnnnnnnnnnnnnnnnnnnnnnnnnnnnnnnnnnnnnnnnnnnnnnnnnnnnnnnnnnnnnnnnnnnnnnnnnnnnnnnnnnnnnnnnnnnnnnnnnnnnnnnnnnnnnnnnnnnnnnnnnnnnnnnnnnnnnnnnnnnnnnnnnnnnnnnnnnnnnnnnnnnnnnnnnnnnnnnnnnnnnnnnnnnnnnnnnnnnnnnnnnnnnnnnnnnnnnnnnnnnnnnnnnnnnnnnnnnnnnnnnnnnnnnnnnnnnnnnnnnnnnnnnnnnnnnnnnnnnnnnnnnnnnnnnnnnnnnnnnnnnnnnnnnnnnnnnnnnnnnnnnnnnnnnnnnnnnnnnnnnnnnnnnnnnnnnnnnnnnnnnnnnnnnnnnnnnnnnnnnnnnnnnnnnnnnnnnnnnnnnnnnnnnnnnnnnnnnnnnnnnnnnnnnnnnnnnnnnnnnnnnnnnnnnnnnnnnnnnnnnnnnnnnnnnnnnnnnnnnnnnnnnnnnnnnnnnnnnnnnnnnnnnnnnnnnnnnnnnnnnnnnnnnnnnnnnnnnnnnnnnnnnnnnnnnnnnnnnnnnnnnnnnnnnnnnnnnnnnnnnnnnnnnnnnnnnnnnnnnnnnnnnnnnnnnnnnnnnnnnnnnnnnnnnnnnnnnnnnnnnnnnnnnnnnnnnnnnnnnnnnnnnnnnnnnnnnnnnnnnnnnnnnnnnnnnnnnnnnnnnnnnnnnnnnnnnnnnnnnnnnnnnnnnnnnnnnnnnnnnnnnnnnnnnnnnnnnnnnnnnnnnnnnnnnnnnnnnnnnnnnnnnnnnnnnnnnnnnnnnnnnnnnnnnnnnnnnnnnnnnnnnnnnnnnnnnnnnnnnnnnnnnnnnnnnnnnnnnnnnnnnnnnnnnnnnnnnnnnnnnnnnnnnnnnnnnnnnnnnnnnnnnnnnnnnnnnnnnnnnnnnnnnnnnnnnnnnnnnnnnnnnnnnnnnnnnnnnnnnnnnnnnnnnnnnnnnnnnnnnnnnnnnnnnnnnnnnnnnnnnnnnnnnnnnnnnnnnnnnnnnnnnnnnnnnnnnnnnnnnnnnnnnnnnnnnnnnnnnnnnnnnnnnnnnnnnnnnnnnnnnnnnnnnnnnnnnnnnnnnnnnnnnnnnnnnnnnnnnnnnnnnnnnnnnnnnnnnnnnnnnnnnnnnnnnnnnnnnnnnnnnnnnnnnnnnnnnnnnnnnnnnnnnnnnnnnnnnnnnnnnnnnnnnnnnnnnnnnnnnnnnnnnnnnnnnnnnnnnnnnnnnnnnnnnnnnnnnnnnnnnnnnnnnnnnnnnnnnnnnnnnnnnnnnnnnnnnnnnnnnnnnnnnnnnnnnnnnnnnnnnnnnnnnnnnnnnnnnnnnnnnnnnnnnnnnnnnnnnnnnnnnnnnnnnnnnnnnnnnnnnnnnnnnnnnnnnnnnnnnnnnnnnnnnnnnnnnnnnnnnnnnnnnnnnnnnnnnnnnnnnnnnnnnnnnnnnnnnnnnnnnnnnnnnnnnnnnnnnnnnnnnnnnnnnnnnnnnnnnnnnnnnnnnnnnnnnnnnnnnnnnnnnnnnnnnnnnnnnnnnnnnnnnnnnnnnnnnnnnnnnnnnnnnnnnnnnnnnnnnnnnnnnnnnnnnnnnnnnnnnnnnnnnnnnnnnnnnnnnnnnnnnnnnnnnnnnnnnnnnnnnnnnnnnnnnnnnnnnnnnnnnnnnnnnnnnnnnnnnnnnnnnnnnnnnnnnnnnnnnnnnnnnnnnnnnnnnnnnnnnnnnnnnnnnnnnnnnnnnnnnnnnnnnnnnnnnnnnnnnnnnnnnnnnnnnnnnnnnnnnnnnnnnnnnnnnnnnnnnnnnnnnnnnnnnnnnnnnnnnnnnnnnnnnnnnnnnnnnnnnnnnnnnnnnnnnnnnnnnnnnnnnnnnnnnnnnnnnnnnnnnnnnnnnnnnnnnnnnnnnnnnnnnnnnnnnnnnnnnnnnnnnnnnnnnnnnnnnnnnnnnnnnnnnnnnnnnnnnnnnnnnnnnnnnnnnnnnnnnnnnnnnnnnnnnnnnnnnnnnnnnnnnnnnnnnnnnnnnnnnnnnnnnnnnnnnnnnnnnnnnnnnnnnnnnnnnnnnnnnnnnnnnnnnnnnnnnnnnnnnnnnnnnnnnnnnnnnnnnnnnnnnnnnnnnnnnnnnnnnnnnnnnnnnnnnnnnnnnnnnnnnnnnnnnnnnnnnnnnnnnnnnnnnnnnnnnnnnnnnnnnnnnnnnnnnnnnnnnnnnnnnnnnnnnnnnnnnnnnnnnnnnnnnnnnnnnnnnnnnnnnnnnnnnnnnnnnnnnnnnnnnnnnnnnnnnnnnnnnnnnnnnnnnnnnnnnnnnnnnnnnnnnnnnnnnnnnnnnnnnnnnnnnnnnnnnnnnnnnnnnnnnnnnnnnnnnnnnnnnnnnnnnnnnnnnnnnnnnnnnnnnnnnnnnnnnnnnnnnnnnnnnnnnnnnnnnnnnnnnnnnnnnnnnnnnnnnnnnnnnnnnnnnnnnnnnnnnnnnnnnnnnnnnnnnnnnnnnnnnnnnnnnnnnnnnnnnnnnnnnnnnnnnnnnnnnnnnnnnnnnnnnnnnnnnnnnnnnnnnnnnnnnnnnnnnnnnnnnnnnnnnnnnnnnnnnnnnnnnnnnnnnnnnnnnnnnnnnnnnnnnnnnnnnnnnnnnnnnnnnnnnnnnnnnnnnnnnnnnnnnnnnnnnnnnnnnnnnnnnnnnnnnnnnnnnnnnnnnnnnnnnnnnnnnnnnnnnnnnnnnnnnnnnnnnnnnnnnnnnnnnnnnnnnnnnnnnnnnnnnnnnnnnnnnnnnnnnnnnnnnnnnnnnnnnnnnnnnnnnnnnnnnnnnnnnnnnnnnnnnnnnnnnnnnnnnnnnnnnnnnnnnnnnnnnnnnnnnnnnnnnnnnnnnnnnnnnnnnnnnnnnnnnnnnnnnnnnnnnnnnnnnnnnnnnnnnnnnnnnnnnnnnnnnnnnnnnnnnnnnnnnnnnnnnnnnnnnnnnnnnnnnnnnnnnnnnnnnnnnnnnnnnnnnnnnnnnnnnnnnnnnnnnnnnnnnnnnnnnnnnnnnnnnnnnnnnnnnnnnnnnnnnnnnnnnnnnnnnnnnnnnnnnnnnnnnnnnnnnnnnnnnnnnnnnnnnnnnnnnnnnnnnnnnnnnnnnnnnnnnnnnnnnnnnnnnnnnnnnnnnnnnnnnnnnnnnnnnnnnnnnnnnnnnnnnnnnnnnnnnnnnnnnnnnnnnnnnnnnnnnnnnnnnnnnnnnnnnnnnnnnnnnnnnnnnnnnnnnnnnnnnnnnnnnnnnnnnnnnnnnnnnnnnnnnnnnnnnnnnnnnnnnnnnnnnnnnnnnnnnnnnnnnnnnnnnnnnnnnnnnnnnnnnnnnnnnnnnnnnnnnnnnnnnnnnnnnnnnnnnnnnnnnnnnnnnnnnnnnnnnnnnnnnnnnnnnnnnnnnnnnnnnnnnnnnnnnnnnnnnnnnnnnnnnnnnnnnnnnnnnnnnnnnnnnnnnnnnnnnnnnnnnnnnnnnnnnnnnnnnnnnnnnnnnnnnnnnnnnnnnnnnnnnnnnnnnnnnnnnnnnnnnnnnnnnnnnnnnnnnnnnnnnnnnnnnnnnnnnnnnnnnnnnnnnnnnnnnnnnnnnnnnnnnnnnnnnnnnnnnnnnnnnnnnnnnnnnnnnnnnnnnnnnnnnnnnnnnnnnnnnnnnnnnnnnnnnnnnnnnnnnnnnnnnnnnnnnnnnnnnnnnnnnnnnnnnnnnnnnnnnnnnnnnnnnnnnnnnnnnnnnnnnnnnnnnnnnnnnnnnnnnnnnnnnnnnnnnnnnnnnnnnnnnnnnnnnnnnnnnnnnnnnnnnnnnnnnnnnnnnnnnnnnnnnnnnnnnnnnnnnnnnnnnnnnnnnnnnnnnnnnnnnnnnnnnnnnnnnnnnnnnnnnnnnnnnnnnnnnnnnnnnnnnnnnnnnnnnnnnnnnnnnnnnnnnnnnnnnnnnnnnnnnnnnnnnnnnnnnnnnnnnnnnnnnnnnnnnnnnnnnnnnnnnnnnnnnnnnnnnnnnnnnnnnnnnnnnnnnnnnnnnnnnnnnnnnnnnnnnnnnnnnnnnnnnnnnnnnnnnnnnnnnnnnnnnnnnnnnnnnnnnnnnnnnnnnnnnnnnnnnnnnnnnnnnnnnnnnnnnnnnnnnnnnnnnnnnnnnnnnnnnnnnnnnnnnnnnnnnnnnnnnnnnnnnnnnnnnnnnnnnnnnnnnnnnnnnnnnnnnnnnnnnnnnnnnnnnnnnnnnnnnnnnnnnnnnnnnnnnnnnnnnnnnnnnnnnnnnnnnnnnnnnnnnnnnnnnnnnnnnnnnnnnnnnnnnnnnnnnnnnnnnnnnnnnnnnnnnnnnnnnnnnnnnnnnnnnnnnnnnnnnnnnnnnnnnnnnnnnnnnnnnnnnnnnnnnnnnnnnnnnnnnnnnnnnnnnnnnnnnnnnnnnnnnnnnnnnnnnnnnnnnnnnnnnnnnnnnnnnnnnnnnnnnnnnnnnnnnnnnnnnnnnnnnnnnnnnnnnnnnnnnnnnnnnnnnnnnnnnnnnnnnnnnnnnnnnnnnnnnnnnnnnnnnnnnnnnnnnnnnnnnnnnnnnnnnnnnnnnnnnnnnnnnnnnnnnnnnnnnnnnnnnnnnnnnnnnnnnnnnnnnnnnnnnnnnnnnnnnnnnnnnnnnnnnnnnnnnnnnnnnnnnnnnnnnnnnnnnnnnnnnnnnnnnnnnnnnnnnnnnnnnnnnnnnnnnnnnnnnnnnnnnnnnnnnnnnnnnnnnnnnnnnnnnnnnnnnnnnnnnnnnnnnnnnnnnnnnnnnnnnnnnnnnnnnnnnnnnnnnnnnnnnnnnnnnnnnnnnnnnnnnnnnnnnnnnnnnnnnnnnnnnnnnnnnnnnnnnnnnnnnnnnnnnnnnnnnnnnnnnnnnnnnnnnnnnnnnnnnnnnnnnnnnnnnnnnnnnnnnnnnnnnnnnnnnnnnnnnnnnnnnnnnnnnnnnnnnnnnnnnnnnnnnnnnnnnnnnnnnnnnnnnnnnnnnnnnnnnnnnnnnnnnnnnnnnnnnnnnnnnnnnnnnnnnnnnnnnnnnnnnnnnnnnnnnnnnnnnnnnnnnnnnnnnnnnnnnnnnnnnnnnnnnnnnnnnnnnnnnnnnnnnnnnnnnnnnnnnnnnnnnnnnnnnnnnnnnnnnnnnnnnnnnnnnnnnnnnnnnnnnnnnnnnnnnnnnnnnnnnnnnnnnnnnnnnnnnnnnnnnnnnnnnnnnnnnnnnnnnnnnnnnnnnnnnnnnnnnnnnnnnnnnnnnnnnnnnnnnnnnnnnnnnnnnnnnnnnnnnnnnnnnnnnnnnnnnnnnnnnnnnnnnnnnnnnnnnnnnnnnnnnnnnnnnnnnnnnnnnnnnnnnnnnnnnnnnnnnnnnnnnnnnnnnnnnnnnnnnnnnnnnnnnnnnnnnnnnnnnnnnnnnnnnnnnnnnnnnnnnnnnnnnnnnnnnnnnnnnnnnnnnnnnnnnnnnnnnnnnnnnnnnnnnnnnnnnnnnnnnnnnnnnnnnnnnnnnnnnnnnnnnnnnnnnnnnnnnnnnnnnnnnnnnnnnnnnnnnnnnnnnnnnnnnnnnnnnnnnnnnnnnnnnnnnnnnnnnnnnnnnnnnnnnnnnnnnnnnnnnnnnnnnnnnnnnnnnnnnnnnnnnnnnnnnnnnnnnnnnnnnnnnnnnnnnnnnnnnnnnnnnnnnnnnnnnnnnnnnnnnnnnnnnnnnnnnnnnnnnnnnnnnnnnnnnnnnnnnnnnnnnnnnnnnnnnnnnnnnnnnnnnnnnnnnnnnnnnnnnnnnnnnnnnnnnnnnnnnnnnnnnnnnnnnnnnnnnnnnnnnnnnnnnnnnnnnnnnnnnnnnnnnnnnnnnnnnnnnnnnnnnnnnnnnnnnnnnnnnnnnnnnnnnnnnnnnnnnnnnnnnnnnnnnnnnnnnnnnnnnnnnnnnnnnnnnnnnnnnnnnnnnnnnnnnnnnnnnnnnnnnnnnnnnnnnnnnnnnnnnnnnnnnnnnnnnnnnnnnnnnnnnnnnnnnnnnnnnnnnnnnnnnnnnnnnnnnnnnnnnnnnnnnnnnnnnnnnnnnnnnnnnnnnnnnnnnnnnnnnnnnnnnnnnnnnnnnnnnnnnnnnnnnnnnnnnnnnnnnnnnnnnnnnnnnnnnnnnnnnnnnnnnnnnnnnnnnnnnnnnnnnnnnnnnnnnnnnnnnnnnnnnnnnnnnnnnnnnnnnnnnnnnnnnnnnnnnnnnnnnnnnnnnnnnnnnnnnnnnnnnnnnnnnnnnnnnnnnnnnnnnnnnnnnnnnnnnnnnnnnnnnnnnnnnnnnnnnnnnnnnnnnnnnnnnnnnnnnnnnnnnnnnnnnnnnnnnnnnnnnnnnnnnnnnnnnnnnnnnnnnnnnnnnnnnnnnnnnnnnnnnnnnnnnnnnnnnnnnnnnnnnnnnnnnnnnnnnnnnnnnnnnnnnnnnnnnnnnnnnnnnnnnnnnnnnnnnnnnnnnnnnnnnnnnnnnnnnnnnnnnnnnnnnnnnnnnnnnnnnnnnnnnnnnnnnnnnnnnnnnnnnnnnnnnnnnnnnnnnnnnnnnnnnnnnnnnnnnnnnnnnnnnnnnnnnnnnnnnnnnnnnnnnnnnnnnnnnnnnnnnnnnnnnnnnnnnnnnnnnnnnnnnnnnnnnnnnnnnnnnnnnnnnnnnnnnnnnnnnnnnnnnnnnnnnnnnnnnnnnnnnnnnnnnnnnnnnnnnnnnnnnnnnnnnnnnnnnnnnnnnnnnnnnnnnnnnnnnnnnnnnnnnnnnnnnnnnnnnnnnnnnnnnnnnnnnnnnnnnnnnnnnnnnnnnnnnnnnnnnnnnnnnnnnnnnnnnnnnnnnnnnnnnnnnnnnnnnnnnnnnnnnnnnnnnnnnnnnnnnnnnnnnnnnnnnnnnnnnnnnnnnnnnnnnnnnnnnnnnnnnnnnnnnnnnnnnnnnnnnnnnnnnnnnnnnnnnnnnnnnnnnnnnnnnnnnnnnnnnnnnnnnnnnnnnnnnnnnnnnnnnnnnnnnnnnnnnnnnnnnnnnnnnnnnnnnnnnnnnnnnnnnnnnnnnnnnnnnnnnnnnnnnnnnnnnnnnnnnnnnnnnnnnnnnnnnnnnnnnnnnnnnnnnnnnnnnnnnnnnnnnnnnnnnnnnnnnnnnnnnnnnnnnnnnnnnnnnnnnnnnnnnnnnnnnnnnnnnnnnnnnnnnnnnnnnnnnnnnnnnnnnnnnnnnnnnnnnnnnnnnnnnnnnnnnnnnnnnnnnnnnnnnnnnnnnnnnnnnnnnnnnnnnnnnnnnnnnnnnnnnnnnnnnnnnnnnnnnnnnnnnnnnnnnnnnnnnnnnnnnnnnnnnnnnnnnnnnnnnnnnnnnnnnnnnnnnnnnnnnnnnnnnnnnnnnnnnnnnnnnnnnnnnnnnnnnnnnnnnnnnnnnnnnnnnnnnnnnnnnnnnnnnnnnnnnnnnnnnnnnnnnnnnnnnnnnnnnnnnnnnnnnnnnnnnnnnnnnnnnnnnnnnnnnnnnnnnnnnnnnnnnnnnnnnnnnnnnnnnnnnnnnnnnnnnnnnnnnnnnnnnnnnnnnnnnnnnnnnnnnnnnnnnnnnnnnnnnnnnnnnnnnnnnnnnnnnnnnnnnnnnnnnnnnnnnnnnnnnnnnnnnnnnnnnnnnnnnnnnnnnnnnnnnnnnnnnnnnnnnnnnnnnnnnnnnnnnnnnnnnnnnnnnnnnnnnnnnnnnnnnnnnnnnnnnnnnnnnnnnnnnnnnnnnnnnnnnnnnnnnnnnnnnnnnnnnnnnnnnnnnnnnnnnnnnnnnnnnnnnnnnnnnnnnnnnnnnnnnnnnnnnnnnnnnnnnnnnnnnnnnnnnnnnnnnnnnnnnnnnnnnnnnnnnnnnnnnnnnnnnnnnnnnnnnnnnnnnnnnnnnnnnnnnnnnnnnnnnnnnnnnnnnnnnnnnnnnnnnnnnnnnnnnnnnnnnnnnnnnnnnnnnnnnnnnnnnnnnnnnnnnnnnnnnnnnnnnnnnnnnnnnnnnnnnnnnnnnnnnnnnnnnnnnnnnnnnnnnnnnnnnnnnnnnnnnnnnnnnnnnnnnnnnnnnnnnnnnnnnnnnnnnnnnnnnnnnnnnnnnnnnnnnnnnnnnnnnnnnnnnnnnnnnnnnnnnnnnnnnnnnnnnnnnnnnnnnnnnnnnnnnnnnnnnnnnnnnnnnnnnnnnnnnnnnnnnnnnnnnnnnnnnnnnnnnnnnnnnnnnnnnnnnnnnnnnnnnnnnnnnnnnnnnnnnnnnnnnnnnnnnnnnnnnnnnnnnnnnnnnnnnnnnnnnnnnnnnnnnnnnnnnnnnnnnnnnnnnnnnnnnnnnnnnnnnnnnnnnnnnnnnnnnnnnnnnnnnnnnnnnnnnnnnnnnnnnnnnnnnnnnnnnnnnnnnnnnnnnnnnnnnnnnnnnnnnnnnnnnnnnnnnnnnnnnnnnnnnnnnnnnnnnnnnnnnnnnnnnnnnnnnnnnnnnnnnnnnnnnnnnnnnnnnnnnnnnnnnnnnnnnnnnnnnnnnnnnnnnnnnnnnnnnnnnnnnnnnnnnnnnnnnnnnnnnnnnnnnnnnnnnnnnnnnnnnnnnnnnnnnnnnnnnnnnnnnnnnnnnnnnnnnnnnnnnnnnnnnnnnnnnnnnnnnnnnnnnnnnnnnnnnnnnnnnnnnnnnnnnnnnnnnnnnnnnnnnnnnnnnnnnnnnnnnnnnnnnnnnnnnnnnnnnnnnnnnnnnnnnnnnnnnnnnnnnnnnnnnnnnnnnnnnnnnnnnnnnnnnnnnnnnnnnnnnnnnnnnnnnnnnnnnnnnnnnnnnnnnnnnnnnnnnnnnnnnnnnnnnnnnnnnnnnnnnnnnnnnnnnnnnnnnnnnnnnnnnnnnnnnnnnnnnnnnnnnnnnnnnnnnnnnnnnnnnnnnnnnnnnnnnnnnnnnnnnnnnnnnnnnnnnnnnnnnnnnnnnnnnnnnnnnnnnnnnnnnnnnnnnnnnnnnnnnnnnnnnnnnnnnnnnnnnnnnnnnnnnnnnnnnnnnnnnnnnnnnnnnnnnnnnnnnnnnnnnnnnnnnnnnnnnnnnnnnnnnnnnnnnnnnnnnnnnnnnnnnnnnnnnnnnnnnnnnnnnnnnnnnnnnnnnnnnnnnnnnnnnnnnnnnnnnnnnnnnnnnnnnnnnnnnnnnnnnnnnnnnnnnnnnnnnnnnnnnnnnnnnnnnnnnnnnnnnnnnnnnnnnnnnnnnnnnnnnnnnnnnnnnnnnnnnnnnnnnnnnnnnnnnnnnnnnnnnnnnnnnnnnnnnnnnnnnnnnnnnnnnnnnnnnnnnnnnnnnnnnnnnnnnnnnnnnnnnnnnnnnnnnnnnnnnnnnnnnnnnnnnnnnnnnnnnnnnnnnnnnnnnnnnnnnnnnnnnnnnnnnnnnnnnnnnnnnnnnnnnnnnnnnnnnnnnnnnnnnnnnnnnnnnnnnnnnnnnnnnnnnnnnnnnnnnnnnnnnnnnnnnnnnnnnnnnnnnnnnnnnnnnnnnnnnnnnnnnnnnnnnnnnnnnnnnnnnnnnnnnnnnnnnnnnnnnnnnnnnnnnnnnnnnnnnnnnnnnnnnnnnnnnnnnnnnnnnnnnnnnnnnnnnnnnnnnnnnnnnnnnnnnnnnnnnnnnnnnnnnnnnnnnnnnnnnnnnnnnnnnnnnnnnnnnnnnnnnnnnnnnnnnnnnnnnnnnnnnnnnnnnnnnnnnnnnnnnnnnnnnnnnnnnnnnnnnnnnnnnnnnnnnnnnnnnnnnnnnnnnnnnnnnnnnnnnnnnnnnnnnnnnnnnnnnnnnnnnnnnnnnnnnnnnnnnnnnnnnnnnnnnnnnnnnnnnnnnnnnnnnnnnnnnnnnnnnnnnnnnnnnnnnnnnnnnnnnnnnnnnnnnnnnnnnnnnnnnnnnnnnnnnnnnnnnnnnnnnnnnnnnnnnnnnnnnnnnnnnnnnnnnnnnnnnnnnnnnnnnnnnnnnnnnnnnnnnnnnnnnnnnnnnnnnnnnnnnnnnnnnnnnnnnnnnnnnnnnnnnnnnnnnnnnnnnnnnnnnnnnnnnnnnnnnnnnnnnnnnnnnnnnnnnnnnnnnnnnnnnnnnnnnnnnnnnnnnnnnnnnnnnnnnnnnnnnnnnnnnnnnnnnnnnnnnnnnnnnnnnnnnnnnnnnnnnnnnnnnnnnnnnnnnnnnnnnnnnnnnnnnnnnnnnnnnnnnnnnnnnnnnnnnnnnnnnnnnnnnnnnnnnnnnnnnnnnnnnnnnnnnnnnnnnnnnnnnnnnnnnnnnnnnnnnnnnnnnnnnnnnnnnnnnnnnnnnnnnnnnnnnnnnnnnnnnnnnnnnnnnnnnnnnnnnnnnnnnnnnnnnnnnnnnnnnnnnnnnnnnnnnnnnnnnnnnnnnnnnnnnnnnnnnnnnnnnnnnnnnnnnnnnnnnnnnnnnnnnnnnnnnnnnnnnnnnnnnnnnnnnnnnnnnnnnnnnnnnnnnnnnnnnnnnnnnnnnnnnnnnnnnnnnnnnnnnnnnnnnnnnnnnnnnnnnnnnnnnnnnnnnnnnnnnnnnnnnnnnnnnnnnnnnnnnnnnnnnnnnnnnnnnnnnnnnnnnnnnnnnnnnnnnnnnnnnnnnnnnnnnnnnnnnnnnnnnnnnnnnnnnnnnnnnnnnnnnnnnnnnnnnnnnnnnnnnnnnnnnnnnnnnnnnnnnnnnnnnnnnnnnnnnnnnnnnnnnnnnnnnnnnnnnnnnnnnnnnnnnnnnnnnnnnnnnnnnnnnnnnnnnnnnnnnnnnnnnnnnnnnnnnnnnnnnnnnnnnnnnnnnnnnnnnnnnnnnnnnnnnnnnnnnnnnnnnnnnnnnnnnnnnnnnnnnnnnnnnnnnnnnnnnnnnnnnnnnnnnnnnnnnnnnnnnnnnnnnnnnnnnnnnnnnnnnnnnnnnnnnnnnnnnnnnnnnnnnnnnnnnnnnnnnnnnnnnnnnnnnnnnnnnnnnnnnnnnnnnnnnnnnnnnnnnnnnnnnnnnnnnnnnnnnnnnnnnnnnnnnnnnnnnnnnnnnnnnnnnnnnnnnnnnnnnnnnnnnnnnnnnnnnnnnnnnnnnnnnnnnnnnnnnnnnnnnnnnnnnnnnnnnnnnnnnnnnnnnnnnnnnnnnnnnnnnnnnnnnnnnnnnnnnnnnnnnnnnnnnnnnnnnnnnnnnnnnnnnnnnnnnnnnnnnnnnnnnnnnnnnnnnnnnnnnnnnnnnnnnnnnnnnnnnnnnnnnnnnnnnnnnnnnnnnnnnnnnnnnnnnnnnnnnnnnnnnnnnnnnnnnnnnnnnnnnnnnnnnnnnnnnnnnnnnnnnnnnnnnnnnnnnnnnnnnnnnnnnnnnnnnnnnnnnnnnnnnnnnnnnnnnnnnnnnnnnnnnnnnnnnnnnnnnnnnnnnnnnnnnnnnnnnnnnnnnnnnnnnnnnnnnnnnnnnnnnnnnnnnnnnnnnnnnnnnnnnnnnnnnnnnnnnnnnnnnnnnnnnnnnnnnnnnnnnnnnnnnnnnnnnnnnnnnnnnnnnnnnnnnnnnnnnnnnnnnnnnnnnnnnnnnnnnnnnnnnnnnnnnnnnnnnnnnnnnnnnnnnnnnnnnnnnnnnnnnnnnnnnnnnnnnnnnnnnnnnnnnnnnnnnnnnnnnnnnnnnnnnnnnnnnnnnnnnnnnnnnnnnnnnnnnnnnnnnnnnnnnnnnnnnnnnnnnnnnnnnnnnnnnnnnnnnnnnnnnnnnnnnnnnnnnnnnnnnnnnnnnnnnnnnnnnnnnnnnnnnnnnnnnnnnnnnnnnnnnnnnnnnnnnnnnnnnnnnnnnnnnnnnnnnnnnnnnnnnnnnnnnnnnnnnnnnnnnnnnnnnnnnnnnnnnnnnnnnnnnnnnnnnnnnnnnnnnnnnnnnnnnnnnnnnnnnnnnnnnnnnnnnnnnnnnnnnnnnnnnnnnnnnnnnnnnnnnnnnnnnnnnnnnnnnnnnnnnnnnnnnnnnnnnnnnnnnnnnnnnnnnnnnnnnnnnnnnnnnnnnnnnnnnnnnnnnnnnnnnnnnnnnnnnnnnnnnnnnnnnnnnnnnnnnnnnnnnnnnnnnnnnnnnnnnnnnnnnnnnnnnnnnnnnnnnnnnnnnnnnnnnnnnnnnnnnnnnnnnnnnnnnnnnnnnnnnnnnnnnnnnnnnnnnnnnnnnnnnnnnnnnnnnnnnnnnnnnnnnnnnnnnnnnnnnnnnnnnnnnnnnnnnnnnnnnnnnnnnnnnnnnnnnnnnnnnnnnnnnnnnnnnnnnnnnnnnnnnnnnnnnnnnnnnnnnnnnnnnnnnnnnnnnnnnnnnnnnnnnnnnnnnnnnnnnnnnnnnnnnnnnnnnnnnnnnnnnnnnnnnnnnnnnnnnnnnnnnnnnnnnnnnnnnnnnnnnnnnnnnnnnnnnnnnnnnnnnnnnnnnnnnnnnnnnnnnnnnnnnnnnnnnnnnnnnnnnnnnnnnnnnnnnnnnnnnnnnnnnnnnnnnnnnnnnnnnnnnnnnnnnnnnnnnnnnnnnnnnnnnnnnnnnnnnnnnnnnnnnnnnnnnnnnnnnnnnnnnnnnnnnnnnnnnnnnnnnnnnnnnnnnnnnnnnnnnnnnnnnnnnnnnnnnnnnnnnnnnnnnnnnnnnnnnnnnnnnnnnnnnnnnnnnnnnnnnnnnnnnnnnnnnnnnnnnnnnnnnnnnnnnnnnnnnnnnnnnnnnnnnnnnnnnnnnnnnnnnnnnnnnnnnnnnnnnnnnnnnnnnnnnnnnnnnnnnnnnnnnnnnnnnnnnnnnnnnnnnnnnnnnnnnnnnnnnnnnnnnnnnnnnnnnnnnnnnnnnnnnnnnnnnnnnnnnnnnnnnnnnnnnnnnnnnnnnnnnnnnnnnnnnnnnnnnnnnnnnnnnnnnnnnnnnnnnnnnnnnnnnnnnnnnnnnnnnnnnnnnnnnnnnnnnnnnnnnnnnnnnnnnnnnnnnnnnnnnnnnnnnnnnnnnnnnnnnnnnnnnnnnnnnnnnnnnnnnnnnnnnnnnnnnnnnnnnnnnnnnnnnnnnnnnnnnnnnnnnnnnnnnnnnnnnnnnnnnnnnnnnnnnnnnnnnnnnnnnnnnnnnnnnnnnnnnnnnnnnnnnnnnnnnnnnnnnnnnnnnnnnnnnnnnnnnnnnnnnnnnnnnnnnnnnnnnnnnnnnnnnnnnnnnnnnnnnnnnnnnnnnnnnnnnnnnnnnnnnnnnnnnnnnnnnnnnnnnnnnnnnnnnnnnnnnnnnnnnnnnnnnnnnnnnnnnnnnnnnnnnnnnnnnnnnnnnnnnnnnnnnnnnnnnnnnnnnnnnnnnnnnnnnnnnnnnnnnnnnnnnnnnnnnnnnnnnnnnnnnnnnnnnnnnnnnnnnnnnnnnnnnnnnnnnnnnnnnnnnnnnnnnnnnnnnnnnnnnnnnnnnnnnnnnnnnnnnnnnnnnnnnnnnnnnnnnnnnnnnnnnnnnnnnnnnnnnnnnnnnnnnnnnnnnnnnnnnnnnnnnnnnnnnnnnnnnnnnnnnnnnnnnnnnnnnnnnnnnnnnnnnnnnnnnnnnnnnnnnnnnnnnnnnnnnnnnnnnnnnnnnnnnnnnnnnnnnnnnnnnnnnnnnnnnnnnnnnnnnnnnnnnnnnnnnnnnnnnnnnnnnnnnnnnnnnnnnnnnnnnnnnnnnnnnnnnnnnnnnnnnnnnnnnnnnnnnnnnnnnnnnnnnnnnnnnnnnnnnnnnnnnnnnnnnnnnnnnnnnnnnnnnnnnnnnnnnnnnnnnnnnnnnnnnnnnnnnnnnnnnnnnnnnnnnnnnnnnnnnnnnnnnnnnnnnnnnnnnnnnnnnnnnnnnnnnnnnnnnnnnnnnnnnnnnnnnnnnnnnnnnnnnnnnnnnnnnnnnnnnnnnnnnnnnnnnnnnnnnnnnnnnnnnnnnnnnnnnnnnnnnnnnnnnnnnnnnnnnnnnnnnnnnnnnnnnnnnnnnnnnnnnnnnnnnnnnnnnnnnnnnnnnnnnnnnnnnnnnnnnnnnnnnnnnnnnnnnnnnnnnnnnnnnnnnnnnnnnnnnnnnnnnnnnnnnnnnnnnnnnnnnnnnnnnnnnnnnnnnnnnnnnnnnnnnnnnnnnnnnnnnnnnnnnnnnnnnnnnnnnnnnnnnnnnnnnnnnnnnnnnnnnnnnnnnnnnnnnnnnnnnnnnnnnnnnnnnnnnnnnnnnnnnnnnnnnnnnnnnnnnnnnnnnnnnnnnnnnnnnnnnnnnnnnnnnnnnnnnnnnnnnnnnnnnnnnnnnnnnnnnnnnnnnnnnnnnnnnnnnnnnnnnnnnnnnnnnnnnnnnnnnnnnnnnnnnnnnnnnnnnnnnnnnnnnnnnnnnnnnnnnnnnnnnnnnnnnnnnnnnnnnnnnnnnnnnnnnnnnnnnnnnnnnnnnnnnnnnnnnnnnnnnnnnnnnnnnnnnnnnnnnnnnnnnnnnnnnnnnnnnnnnnnnnnnnnnnnnnnnnnnnnnnnnnnnnnnnnnnnnnnnnnnnnnnnnnnnnnnnnnnnnnnnnnnnnnnnnnnnnnnnnnnnnnnnnnnnnnnnnnnnnnnnnnnnnnnnnnnnnnnnnnnnnnnnnnnnnnnnnnnnnnnnnnnnnnnnnnnnnnnnnnnnnnnnnnnnnnnnnnnnnnnnnnnnnnnnnnnnnnnnnnnnnnnnnnnnnnnnnnnnnnnnnnnnnnnnnnnnnnnnnnnnnnnnnnnnnnnnnnnnnnnnnnnnnnnnnnnnnnnnnnnnnnnnnnnnnnnnnnnnnnnnnnnnnnnnnnnnnnnnnnnnnnnnnnnnnnnnnnnnnnnnnnnnnnnnnnnnnnnnnnnnnnnnnnnnnnnnnnnnnnnnnnnnnnnnnnnnnnnnnnnnnnnnnnnnnnnnnnnnnnnnnnnnnnnnnnnnnnnnnnnnnnnnnnnnnnnnnnnnnnnnnnnnnnnnnnnnnnnnnnnnnnnnnnnnnnnnnnnnnnnnnnnnnnnnnnnnnnnnnnnnnnnnnnnnnnnnnnnnnnnnnnnnnnnnnnnnnnnnnnnnnnnnnnnnnnnnnnnnnnnnnnnnnnnnnnnnnnnnnnnnnnnnnnnnnnnnnnnnnnnnnnnnnnnnnnnnnnnnnnnnnnnnnnnnnnnnnnnnnnnnnnnnnnnnnnnnnnnnnnnnnnnnnnnnnnnnnnnnnnnnnnnnnnnnnnnnnnnnnnnnnnnnnnnnnnnnnnnnnnnnnnnnnnnnnnnnnnnnnnnnnnnnnnnnnnnnnnnnnnnnnnnnnnnnnnnnnnnnnnnnnnnnnnnnnnnnnnnnnnnnnnnnnnnnnnnnnnnnnnnnnnnnnnnnnnnnnnnnnnnnnnnnnnnnnnnnnnnnnnnnnnnnnnnnnnnnnnnnnnnnnnnnnnnnnnnnnnnnnnnnnnnnnnnnnnnnnnnnnnnnnnnnnnnnnnnnnnnnnnnnnnnnnnnnnnnnnnnnnnnnnnnnnnnnnnnnnnnnnnnnnnnnnnnnnnnnnnnnnnnnnnnnnnnnnnnnnnnnnnnnnnnnnnnnnnnnnnnnnnnnnnnnnnnnnnnnnnnnnnnnnnnnnnnnnnnnnnnnnnnnnnnnnnnnnnnnnnnnnnnnnnnnnnnnnnnnnnnnnnnnnnnnnnnnnnnnnnnnnnnnnnnnnnnnnnnnnnnnnnnnnnnnnnnnnnnnnnnnnnnnnnnnnnnnnnnnnnnnnnnnnnnnnnnnnnnnnnnnnnnnnnnnnnnnnnnnnnnnnnnnnnnnnnnnnnnnnnnnnnnnnnnnnnnnnnnnnnnnnnnnnnnnnnnnnnnnnnnnnnnnnnnnnnnnnnnnnnnnnnnnnnnnnnnnnnnnnnnnnnnnnnnnnnnnnnnnnnnnnnnnnnnnnnnnnnnnnnnnnnnnnnnnnnnnnnnnnnnnnnnnnnnnnnnnnnnnnnnnnnnnnnnnnnnnnnnnnnnnnnnnnnnnnnnnnnnnnnnnnnnnnnnnnnnnnnnnnnnnnnnnnnnnnnnnnnnnnnnnnnnnnnnnnnnnnnnnnnnnnnnnnnnnnnnnnnnnnnnnnnnnnnnnnnnnnnnnnnnnnnnnnnnnnnnnnnnnnnnnnnnnnnnnnnnnnnnnnnnnnnnnnnnnnnnnnnnnnnnnnnnnnnnnnnnnnnnnnnnnnnnnnnnnnnnnnnnnnnnnnnnnnnnnnnnnnnnnnnnnnnnnnnnnnnnnnnnnnnnnnnnnnnnnnnnnnnnnnnnnnnnnnnnnnnnnnnnnnnnnnnnnnnnnnnnnnnnnnnnnnnnnnnnnnnnnnnnnnnnnnnnnnnnnnnnnnnnnnnnnnnnnnnnnnnnnnnnnnnnnnnnnnnnnnnnnnnnnnnnnnnnnnnnnnnnnnnnnnnnnnnnnnnnnnnnnnnnnnnnnnnnnnnnnnnnnnnnnnnnnnnnnnnnnnnnnnnnnnnnnnnnnnnnnnnnnnnnnnnnnnnnnnnnnnnnnnnnnnnnnnnnnnnnnnnnnnnnnnnnnnnnnnnnnnnnnnnnnnnnnnnnnnnnnnnnnnnnnnnnnnnnnnnnnnnnnnnnnnnnnnnnnnnnnnnnnnnnnnnnnnnnnnnnnnnnnnnnnnnnnnnnnnnnnnnnnnnnnnnnnnnnnnnnnnnnnnnnnnnnnnnnnnnnnnnnnnnnnnnnnnnnnnnnnnnnnnnnnnnnnnnnnnnnnnnnnnnnnnnnnnnnnnnnnnnnnnnnnnnnnnnnnnnnnnnnnnnnnnnnnnnnnnnnnnnnnnnnnnnnnnnnnnnnnnnnnnnnnnnnnnnnnnnnnnnnnnnnnnnnnnnnnnnnnnnnnnnnnnnnnnnnnnnnnnnnnnnnnnnnnnnnnnnnnnnnnnnnnnnnnnnnnnnnnnnnnnnnnnnnnnnnnnnnnnnnnnnnnnnnnnnnnnnnnnnnnnnnnnnnnnnnnnnnnnnnnnnnnnnnnnnnnnnnnnnnnnnnnnnnnnnnnnnnnnnnnnnnnnnnnnnnnnnnnnnnnnnnnnnnnnnnnnnnnnnnnnnnnnnnnnnnnnnnnnnnnnnnnnnnnnnnnnnnnnnnnnnnnnnnnnnnnnnnnnnnnnnnnnnnnnnnnnnnnnnnnnnnnnnnnnnnnnnnnnnnnnnnnnnnnnnnnnnnnnnnnnnnnnnnnnnnnnnnnnnnnnnnnnnnnnnnnnnnnnnnnnnnnnnnnnnnnnnnnnnnnnnnnnnnnnnnnnnnnnnnnnnnnnnnnnnnnnnnnnnnnnnnnnnnnnnnnnnnnnnnnnnnnnnnnnnnnnnnnnnnnnnnnnnnnnnnnnnnnnnnnnnnnnnnnnnnnnnnnnnnnnnnnnnnnnnnnnnnnnnnnnnnnnnnnnnnnnnnnnnnnnnnnnnnnnnnnnnnnnnnnnnnnnnnnnnnnnnnnnnnnnnnnnnnnnnnnnnnnnnnnnnnnnnnnnnnnnnnnnnnnnnnnnnnnnnnnnnnnnnnnnnnnnnnnnnnnnnnnnnnnnnnnnnnnnnnnnnnnnnnnnnnnnnnnnnnnnnnnnnnnnnnnnnnnnnnnnnnnnnnnnnnnnnnnnnnnnnnnnnnnnnnnnnnnnnnnnnnnnnnnnnnnnnnnnnnnnnnnnnnnnnnnnnnnnnnnnnnnnnnnnnnnnnnnnnnnnnnnnnnnnnnnnnnnnnnnnnnnnnnnnnnnnnnnnnnnnnnnnnnnnnnnnnnnnnnnnnnnnnnnnnnnnnnnnnnnnnnnnnnnnnnnnnnnnnnnnnnnnnnnnnnnnnnnnnnnnnnnnnnnnnnnnnnnnnnnnnnnnnnnnnnnnnnnnnnnnnnnnnnnnnnnnnnnnnnnnnnnnnnnnnnnnnnnnnnnnnnnnnnnnnnnnnnnnnnnnnnnnnnnnnnnnnnnnnnnnnnnnnnnnnnnnnnnnnnnnnnnnnnnnnnnnnnnnnnnnnnnnnnnnnnnnnnnnnnnnnnnnnnnnnnnnnnnnnnnnnnnnnnnnnnnnnnnnnnnnnnnnnnnnnnnnnnnnnnnnnnnnnnnnnnnnnnnnnnnnnnnnnnnnnnnnnnnnnnnnnnnnnnnnnnnnnnnnnnnnnnnnnnnnnnnnnnnnnnnnnnnnnnnnnnnnnnnnnnnnnnnnnnnnnnnnnnnnnnnnnnnnnnnnnnnnnnnnnnnnnnnnnnnnnnnnnnnnnnnnnnnnnnnnnnnnnnnnnnnnnnnnnnnnnnnnnnnnnnnnnnnnnnnnnnnnnnnnnnnnnnnnnnnnnnnnnnnnnnnnnnnnnnnnnnnnnnnnnnnnnnnnnnnnnnnnnnnnnnnnnnnnnnnnnnnnnnnnnnnnnnnnnnnnnnnnnnnnnnnnnnnnnnnnnnnnnnnnnnnnnnnnnnnnnnnnnnnnnnnnnnnnnnnnnnnnnnnnnnnnnnnnnnnnnnnnnnnnnnnnnnnnnnnnnnnnnnnnnnnnnnnnnnnnnnnnnnnnnnnnnnnnnnnnnnnnnnnnnnnnnnnnnnnnnnnnnnnnnnnnnnnnnnnnnnnnnnnnnnnnnnnnnnnnnnnnnnnnnnnnnnnnnnnnnnnnnnnnnnnnnnnnnnnnnnnnnnnnnnnnnnnnnnnnnnnnnnnnnnnnnnnnnnnnnnnnnnnnnnnnnnnnnnnnnnnnnnnnnnnnnnnnnnnnnnnnnnnnnnnnnnnnnnnnnnnnnnnnnnnnnnnnnnnnnnnnnnnnnnnnnnnnnnnnnnnnnnnnnnnnnnnnnnnnnnnnnnnnnnnnnnnnnnnnnnnnnnnnnnnnnnnnnnnnnnnnnnnnnnnnnnnnnnnnnnnnnnnnnnnnnnnnnnnnnnnnnnnnnnnnnnnnnnnnnnnnnnnnnnnnnnnnnnnnnnnnnnnnnnnnnnnnnnnnnnnnnnnnnnnnnnnnnnnnnnnnnnnnnnnnnnnnnnnnnnnnnnnnnnnnnnnnnnnnnnnnnnnnnnnnnnnnnnnnnnnnnnnnnnnnnnnnnnnnnnnnnnnnnnnnnnnnnnnnnnnnnnnnnnnnnnnnnnnnnnnnnnnnnnnnnnnnnnnnnnnnnnnnnnnnnnnnnnnnnnnnnnnnnnnnnnnnnnnnnnnnnnnnnnnnnnnnnnnnnnnnnnnnnnnnnnnnnnnnnnnnnnnnnnnnnnnnnnnnnnnnnnnnnnnnnnnnnnnnnnnnnnnnnnnnnnnnnnnnnnnnnnnnnnnnnnnnnnnnnnnnnnnnnnnnnnnnnnnnnnnnnnnnnnnnnnnnnnnnnnnnnnnnnnnnnnnnnnnnnnnnnnnnnnnnnnnnnnnnnnnnnnnnnnnnnnnnnnnnnnnnnnnnnnnnnnnnnnnnnnnnnnnnnnnnnnnnnnnnnnnnnnnnnnnnnnnnnnnnnnnnnnnnnnnnnnnnnnnnnnnnnnnnnnnnnnnnnnnnnnnnnnnnnnnnnnnnnnnnnnnnnnnnnnnnnnnnnnnnnnnnnnnnnnnnnnnnnnnnnnnnnnnnnnnnnnnnnnnnnnnnnnnnnnnnnnnnnnnnnnnnnnnnnnnnnnnnnnnnnnnnnnnnnnnnnnnnnnnnnnnnnnnnnnnnnnnnnnnnnnnnnnnnnnnnnnnnnnnnnnnnnnnnnnnnnnnnnnnnnnnnnnnnnnnnnnnnnnnnnnnnnnnnnnnnnnnnnnnnnnnnnnnnnnnnnnnnnnnnnnnnnnnnnnnnnnnnnnnnnnnnnnnnnnnnnnnnnnnnnnnnnnnnnnnnnnnnnnnnnnnnnnnnnnnnnnnnnnnnnnnnnnnnnnnnnnnnnnnnnnnnnnnnnnnnnnnnnnnnnnnnnnnnnnnnnnnnnnnnnnnnnnnnnnnnnnnnnnnnnnnnnnnnnnnnnnnnnnnnnnnnnnnnnnnnnnnnnnnnnnnnnnnnnnnnnnnnnnnnnnnnnnnnnnnnnnnnnnnnnnnnnnnnnnnnnnnnnnnnnnnnnnnnnnnnnnnnnnnnnnnnnnnnnnnnnnnnnnnnnnnnnnnnnnnnnnnnnnnnnnnnnnnnnnnnnnnnnnnnnnnnnnnnnnnnnnnnnnnnnnnnnnnnnnnnnnnnnnnnnnnnnnnnnnnnnnnnnnnnnnnnnnnnnnnnnnnnnnnnnnnnnnnnnnnnnnnnnnnnnnnnnnnnnnnnnnnnnnnnnnnnnnnnnnnnnnnnnnnnnnnnnnnnnnnnnnnnnnnnnnnnnnnnnnnnnnnnnnnnnnnnnnnnnnnnnnnnnnnnnnnnnnnnnnnnnnnnnnnnnnnnnnnnnnnnnnnnnnnnnnnnnnnnnnnnnnnnnnnnnnnnnnnnnnnnnnnnnnnnnnnnnnnnnnnnnnnnnnnnnnnnnnnnnnnnnnnnnnnnnnnnnnnnnnnnnnnnnnnnnnnnnnnnnnnnnnnnnnnnnnnnnnnnnnnnnnnnnnnnnnnnnnnnnnnnnnnnnnnnnnnnnnnnnnnnnnnnnnnnnnnnnnnnnnnnnnnnnnnnnnnnnnnnnnnnnnnnnnnnnnnnnnnnnnnnnnnnnnnnnnnnnnnnnnnnnnnnnnnnnnnnnnnnnnnnnnnnnnnnnnnnnnnnnnnnnnnnnnnnnnnnnnnnnnnnnnnnnnnnnnnnnnnnnnnnnnnnnnnnnnnnnnnnnnnnnnnnnnnnnnnnnnnnnnnnnnnnnnnnnnnnnnnnnnnnnnnnnnnnnnnnnnnnnnnnnnnnnnnnnnnnnnnnnnnnnnnnnnnnnnnnnnnnnnnnnnnnnnnnnnnnnnnnnnnnnnnnnnnnnnnnnnnnnnnnnnnnnnnnnnnnnnnnnnnnnnnnnnnnnnnnnnnnnnnnnnnnnnnnnnnnnnnnnnnnnnnnnnnnnnnnnnnnnnnnnnnnnnnnnnnnnnnnnnnnnnnnnnnnnnnnnnnnnnnnnnnnnnnnnnnnnnnnnnnnnnnnnnnnnnnnnnnnnnnnnnnnnnnnnnnnnnnnnnnnnnnnnnnnnnnnnnnnnnnnnnnnnnnnnnnnnnnnnnnnnnnnnnnnnnnnnnnnnnnnnnnnnnnnnnnnnnnnnnnnnnnnnnnnnnnnnnnnnnnnnnnnnnnnnnnnnnnnnnnnnnnnnnnnnnnnnnnnnnnnnnnnnnnnnnnnnnnnnnnnnnnnnnnnnnnnnnnnnnnnnnnnnnnnnnnnnnnnnnnnnnnnnnnnnnnnnnnnnnnnnnnnnnnnnnnnnnnnnnnnnnnnnnnnnnnnnnnnnnnnnnnnnnnnnnnnnnnnnnnnnnnnnnnnnnnnnnnnnnnnnnnnnnnnnnnnnnnnnnnnnnnnnnnnnnnnnnnnnnnnnnnnnnnnnnnnnnnnnnnnnnnnnnnnnnnnnnnnnnnnnnnnnnnnnnnnnnnnnnnnnnnnnnnnnnnnnnnnnnnnnnnnnnnnnnnnnnnnnnnnnnnnnnnnnnnnnnnnnnnnnnnnnnnnnnnnnnnnnnnnnnnnnnnnnnnnnnnnnnnnnnnnnnnnnnnnnnnnnnnnnnnnnnnnnnnnnnnnnnnnnnnnnnnnnnnnnnnnnnnnnnnnnnnnnnnnnnnnnnnnnnnnnnnnnnnnnnnnnnnnnnnnnnnnnnnnnnnnnnnnnnnnnnnnnnnnnnnnnnnnnnnnnnnnnnnnnnnnnnnnnnnnnnnnnnnnnnnnnnnnnnnnnnnnnnnnnnnnnnnnnnnnnnnnnnnnnnnnnnnnnnnnnnnnnnnnnnnnnnnnnnnnnnnnnnnnnnnnnnnnnnnnnnnnnnnnnnnnnnnnnnnnnnnnnnnnnnnnnnnnnnnnnnnnnnnnnnnnnnnnnnnnnnnnnnnnnnnnnnnnnnnnnnnnnnnnnnnnnnnnnnnnnnnnnnnnnnnnnnnnnnnnnnnnnnnnnnnnnnnnnnnnnnnnnnnnnnnnnnnnnnnnnnnnnnnnnnnnnnnnnnnnnnnnnnnnnnnnnnnnnnnnnnnnnnnnnnnnnnnnnnnnnnnnnnnnnnnnnnnnnnnnnnnnnnnnnnnnnnnnnnnnnnnnnnnnnnnnnnnnnnnnnnnnnnnnnnnnnnnnnnnnnnnnnnnnnnnnnnnnnnnnnnnnnnnnnnnnnnnnnnnnnnnnnnnnnnnnnnnnnnnnnnnnnnnnnnnnnnnnnnnnnnnnnnnnnnnnnnnnnnnnnnnnnnnnnnnnnnnnnnnnnnnnnnnnnnnnnnnnnnnnnnnnnnnnnnnnnnnnnnnnnnnnnnnnnnnnnnnnnnnnnnnnnnnnnnnnnnnnnnnnnnnnnnnnnnnnnnnnnnnnnnnnnnnnnnnnnnnnnnnnnnnnnnnnnnnnnnnnnnnnnnnnnnnnnnnnnnnnnnnnnnnnnnnnnnnnnnnnnnnnnnnnnnnnnnnnnnnnnnnnnnnnnnnnnnnnnnnnnnnnnnnnnnnnnnnnnnnnnnnnnnnnnnnnnnnnnnnnnnnnnnnnnnnnnnnnnnnnnnnnnnnnnnnnnnnnnnnnnnnnnnnnnnnnnnnnnnnnnnnnnnnnnnnnnnnnnnnnnnnnnnnnnnnnnnnnnnnnnnnnnnnnnnnnnnnnnnnnnnnnnnnnnnnnnnnnnnnnnnnnnnnnnnnnnnnnnnnnnnnnnnnnnnnnnnnnnnnnnnnnnnnnnnnnnnnnnnnnnnnnnnnnnnnnnnnnnnnnnnnnnnnnnnnnnnnnnnnnnnnnnnnnnnnnnnnnnnnnnnnnnnnnnnnnnnnnnnnnnnnnnnnnnnnnnnnnnnnnnnnnnnnnnnnnnnnnnnnnnnnnnnnnnnnnnnnnnnnnnnnnnnnnnnnnnnnnnnnnnnnnnnnnnnnnnnnnnnnnnnnnnnnnnnnnnnnnnnnnnnnnnnnnnnnnnnnnnnnnnnnnnnnnnnnnnnnnnnnnnnnnnnnnnnnnnnnnnnnnnnnnnnnnnnnnnnnnnnnnnnnnnnnnnnnnnnnnnnnnnnnnnnnnnnnnnnnnnnnnnnnnnnnnnnnnnnnnnnnnnnnnnnnnnnnnnnnnnnnnnnnnnnnnnnnnnnnnnnnnnnnnnnnnnnnnnnnnnnnnnnnnnnnnnnnnnnnnnnnnnnnnnnnnnnnnnnnnnnnnnnnnnnnnnnnnnnnnnnnnnnnnnnnnnnnnnnnnnnnnnnnnnnnnnnnnnnnnnnnnnnnnnnnnnnnnnnnnnnnnnnnnnnnnnnnnnnnnnnnnnnnnnnnnnnnnnnnnnnnnnnnnnnnnnnnnnnnnnnnnnnnnnnnnnnnnnnnnnnnnnnnnnnnnnnnnnnnnnnnnnnnnnnnnnnnnnnnnnnnnnnnnnnnnnnnnnnnnnnnnnnnnnnnnnnnnnnnnnnnnnnnnnnnnnnnnnnnnnnnnnnnnnnnnnnnnnnnnnnnnnnnnnnnnnnnnnnnnnnnnnnnnnnnnnnnnnnnnnnnnnnnnnnnnnnnnnnnnnnnnnnnnnnnnnnnnnnnnnnnnnnnnnnnnnnnnnnnnnnnnnnnnnnnnnnnnnnnnnnnnnnnnnnnnnnnnnnnnnnnnnnnnnnnnnnnnnnnnnnnnnnnnnnnnnnnnnnnnnnnnnnnnnnnnnnnnnnnnnnnnnnnnnnnnnnnnnnnnnnnnnnnnnnnnnnnnnnnnnnnnnnnnnnnnnnnnnnnnnnnnnnnnnnnnnnnnnnnnnnnnnnnnnnnnnnnnnnnnnnnnnnnnnnnnnnnnnnnnnnnnnnnnnnnnnnnnnnnnnnnnnnnnnnnnnnnnnnnnnnnnnnnnnnnnnnnnnnnnnnnnnnnnnnnnnnnnnnnnnnnnnnnnnnnnnnnnnnnnnnnnnnnnnnnnnnnnnnnnnnnnnnnnnnnnnnnnnnnnnnnnnnnnnnnnnnnnnnnnnnnnnnnnnnnnnnnnnnnnnnnnnnnnnnnnnnnnnnnnnnnnnnnnnnnnnnnnnnnnnnnnnnnnnnnnnnnnnnnnnnnnnnnnnnnnnnnnnnnnnnnnnnnnnnnnnnnnnnnnnnnnnnnnnnnnnnnnnnnnnnnnnnnnnnnnnnnnnnnnnnnnnnnnnnnnnnnnnnnnnnnnnnnnnnnnnnnnnnnnnnnnnnnnnnnnnnnnnnnnnnnnnnnnnnnnnnnnnnnnnnnnnnnnnnnnnnnnnnnnnnnnnnnnnnnnnnnnnnnnnnnnnnnnnnnnnnnnnnnnnnnnnnnnnnnnnnnnnnnnnnnnnnnnnnnnnnnnnnnnnnnnnnnnnnnnnnnnnnnnnnnnnnnnnnnnnnnnnnnnnnnnnnnnnnnnnnnnnnnnnnnnnnnnnnnnnnnnnnnnnnnnnnnnnnnnnnnnnnnnnnnnnnnnnnnnnnnnnnnnnnnnnnnnnnnnnnnnnnnnnnnnnnnnnnnnnnnnnnnnnnnnnnnnnnnnnnnnnnnnnnnnnnnnnnnnnnnnnnnnnnnnnnnnnnnnnnnnnnnnnnnnnnnnnnnnnnnnnnnnnnnnnnnnnnnnnnnnnnnnnnnnnnnnnnnnnnnnnnnnnnnnnnnnnnnnnnnnnnnnnnnnnnnnnnnnnnnnnnnnnnnnnnnnnnnnnnnnnnnnnnnnnnnnnnnnnnnnnnnnnnnnnnnnnnnnnnnnnnnnnnnnnnnnnnnnnnnnnnnnnnnnnnnnnnnnnnnnnnnnnnnnnnnnnnnnnnnnnnnnnnnnnnnnnnnnnnnnnnnnnnnnnnnnnnnnnnnnnnnnnnnnnnnnnnnnnnnnnnnnnnnnnnnnnnnnnnnnnnnnnnnnnnnnnnnnnnnnnnnnnnnnnnnnnnnnnnnnnnnnnnnnnnnnnnnnnnnnnnnnnnnnnnnnnnnnnnnnnnnnnnnnnnnnnnnnnnnnnnnnnnnnnnnnnnnnnnnnnnnnnnnnnnnnnnnnnnnnnnnnnnnnnnnnnnnnnnnnnnnnnnnnnnnnnnnnnnnnnnnnnnnnnnnnnnnnnnnnnnnnnnnnnnnnnnnnnnnnnnnnnnnnnnnnnnnnnnnnnnnnnnnnnnnnnnnnnnnnnnnnnnnnnnnnnnnnnnnnnnnnnnnnnnnnnnnnnnnnnnnnnnnnnnnnnnnnnnnnnnnnnnnnnnnnnnnnnnnnnnnnnnnnnnnnnnnnnnnnnnnnnnnnnnnnnnnnnnnnnnnnnnnnnnnnnnnnnnnnnnnnnnnnnnnnnnnnnnnnnnnnnnnnnnnnnnnnnnnnnnnnnnnnnnnnnnnnnnnnnnnnnnnnnnnnnnnnnnnnnnnnnnnnnnnnnnnnnnnnnnnnnnnnnnnnnnnnnnnnnnnnnnnnnnnnnnnnnnnnnnnnnnnnnnnnnnnnnnnnnnnnnnnnnnnnnnnnnnnnnnnnnnnnnnnnnnnnnnnnnnnnnnnnnnnnnnnnnnnnnnnnnnnnnnnnnnnnnnnnnnnnnnnnnnnnnnnnnnnnnnnnnnnnnnnnnnnnnnnnnnnnnnnnnnnnnnnnnnnnnnnnnnnnnnnnnnnnnnnnnnnnnnnnnnnnnnnnnnnnnnnnnnnnnnnnnnnnnnnnnnnnnnnnnnnnnnnnnnnnnnnnnnnnnnnnnnnnnnnnnnnnnnnnnnnnnnnnnnnnnnnnnnnnnnnnnnnnnnnnnnnnnnnnnnnnnnnnnnnnnnnnnnnnnnnnnnnnnnnnnnnnnnnnnnnnnnnnnnnnnnnnnnnnnnnnnnnnnnnnnnnnnnnnnnnnnnnnnnnnnnnnnnnnnnnnnnnnnnnnnnnnnnnnnnnnnnnnnnnnnnnnnnnnnnnnnnnnnnnnnnnnnnnnnnnnnnnnnnnnnnnnnnnnnnnnnnnnnnnnnnnnnnnnnnnnnnnnnnnnnnnnnnnnnnnnnnnnnnnnnnnnnnnnnnnnnnnnnnnnnnnnnnnnnnnnnnnnnnnnnnnnnnnnnnnnnnnnnnnnnnnnnnnnnnnnnnnnnnnnnnnnnnnnnnnnnnnnnnnnnnnnnnnnnnnnnnnnnnnnnnnnnnnnnnnnnnnnnnnnnnnnnnnnnnnnnnnnnnnnnnnnnnnnnnnnnnnnnnnnnnnnnnnnnnnnnnnnnnnnnnnnnnnnnnnnnnnnnnnnnnnnnnnnnnnnnnnnnnnnnnnnnnnnnnnnnnnnnnnnnnnnnnnnnnnnnnnnnnnnnnnnnnnnnnnnnnnnnnnnnnnnnnnnnnnnnnnnnnnnnnnnnnnnnnnnnnnnnnnnnnnnnnnnnnnnnnnnnnnnnnnnnnnnnnnnnnnnnnnnnnnnnnnnnnnnnnnnnnnnnnnnnnnnnnnnnnnnnnnnnnnnnnnnnnnnnnnnnnnnnnnnnnnnnnnnnnnnnnnnnnnnnnnnnnnnnnnnnnnnnnnnnnnnnnnnnnnnnnnnnnnnnnnnnnnnnnnnnnnnnnnnnnnnnnnnnnnnnnnnnnnnnnnnnnnnnnnnnnnnnnnnnnnnnnnnnnnnnnnnnnnnnnnnnnnnnnnnnnnnnnnnnnnnnnnnnnnnnnnnnnnnnnnnnnnnnnnnnnnnnnnnnnnnnnnnnnnnnnnnnnnnnnnnnnnnnnnnnnnnnnnnnnnnnnnnnnnnnnnnnnnnnnnnnnnnnnnnnnnnnnnnnnnnnnnnnnnnnnnnnnnnnnnnnnnnnnnnnnnnnnnnnnnnnnnnnnnnnnnnnnnnnnnnnnnnnnnnnnnnnnnnnnnnnnnnnnnnnnnnnnnnnnnnnnnnnnnnnnnnnnnnnnnnnnnnnnnnnnnnnnnnnnnnnnnnnnnnnnnnnnnnnnnnnnnnnnnnnnnnnnnnnnnnnnnnnnnnnnnnnnnnnnnnnnnnnnnnnnnnnnnnnnnnnnnnnnnnnnnnnnnnnnnnnnnnnnnnnnnnnnnnnnnnnnnnnnnnnnnnnnnnnnnnnnnnnnnnnnnnnnnnnnnnnnnnnnnnnnnnnnnnnnnnnnnnnnnnnnnnnnnnnnnnnnnnnnnnnnnnnnnnnnnnnnnnnnnnnnnnnnnnnnnnnnnnnnnnnnnnnnnnnnnnnnnnnnnnnnnnnnnnnnnnnnnnnnnnnnnnnnnnnnnnnnnnnnnnnnnnnnnnnnnnnnnnnnnnnnnnnnnnnnnnnnnnnnnnnnnnnnnnnnnnnnnnnnnnnnnnnnnnnnnnnnnnnnnnnnnnnnnnnnnnnnnnnnnnnnnnnnnnnnnnnnnnnnnnnnnnnnnnnnnnnnnnnnnnnnnnnnnnnnnnnnnnnnnnnnnnnnnnnnnnnnnnnnnnnnnnnnnnnnnnnnnnnnnnnnnnnnnnnnnnnnnnnnnnnnnnnnnnnnnnnnnnnnnnnnnnnnnnnnnnnnnnnnnnnnnnnnnnnnnnnnnnnnnnnnnnnnnnnnnnnnnnnnnnnnnnnnnnnnnnnnnnnnnnnnnnnnnnnnnnnnnnnnnnnnnnnnnnnnnnnnnnnnnnnnnnnnnnnnnnnnnnnnnnnnnnnnnnnnnnnnnnnnnnnnnnnnnnnnnnnnnnnnnnnnnnnnnnnnnnnnnnnnnnnnnnnnnnnnnnnnnnnnnnnnnnnnnnnnnnnnnnnnnnnnnnnnnnnnnnnnnnnnnnnnnnnnnnnnnnnnnnnnnnnnnnnnnnnnnnnnnnnnnnnnnnnnnnnnnnnnnnnnnnnnnnnnnnnnnnnnnnnnnnnnnnnnnnnnnnnnnnnnnnnnnnnnnnnnnnnnnnnnnnnnnnnnnnnnnnnnnnnnnnnnnnnnnnnnnnnnnnnnnnnnnnnnnnnnnnnnnnnnnnnnnnnnnnnnnnnnnnnnnnnnnnnnnnnnnnnnnnnnnnnnnnnnnnnnnnnnnnnnnnnnnnnnnnnnnnnnnnnnnnnnnnnnnnnnnnnnnnnnnnnnnnnnnnnnnnnnnnnnnnnnnnnnnnnnnnnnnnnnnnnnnnnnnnnnnnnnnnnnnnnnnnnnnnnnnnnnnnnnnnnnnnnnnnnnnnnnnnnnnnnnnnnnnnnnnnnnnnnnnnnnnnnnnnnnnnnnnnnnnnnnnnnnnnnnnnnnnnnnnnnnnnnnnnnnnnnnnnnnnnnnnnnnnnnnnnnnnnnnnnnnnnnnnnnnnnnnnnnnnnnnnnnnnnnnnnnnnnnnnnnnnnnnnnnnnnnnnnnnnnnnnnnnnnnnnnnnnnnnnnnnnnnnnnnnnnnnnnnnnnnnnnnnnnnnnnnnnnnnnnnnnnnnnnnnnnnnnnnnnnnnnnnnnnnnnnnnnnnnnnnnnnnnnnnnnnnnnnnnnnnnnnnnnnnnnnnnnnnnnnnnnnnnnnnnnnnnnnnnnnnnnnnnnnnnnnnnnnnnnnnnnnnnnnnnnnnnnnnnnnnnnnnnnnnnnnnnnnnnnnnnnnnnnnnnnnnnnnnnnnnnnnnnnnnnnnnnnnnnnnnnnnnnnnnnnnnnnnnnnnnnnnnnnnnnnnnnnnnnnnnnnnnnnnnnnnnnnnnnnnnnnnnnnnnnnnnnnnnnnnnnnnnnnnnnnnnnnnnnnnnnnnnnnnnnnnnnnnnnnnnnnnnnnnnnnnnnnnnnnnnnnnnnnnnnnnnnnnnnnnnnnnnnnnnnnnnnnnnnnnnnnnnnnnnnnnnnnnnnnnnnnnnnnnnnnnnnnnnnnnnnnnnnnnnnnnnnnnnnnnnnnnnnnnnnnnnnnnnnnnnnnnnnnnnnnnnnnnnnnnnnnnnnnnnnnnnnnnnnnnnnnnnnnnnnnnnnnnnnnnnnnnnnnnnnnnnnnnnnnnnnnnnnnnnnnnnnnnnnnnnnnnnnnnnnnnnnnnnnnnnnnnnnnnnnnnnnnnnnnnnnnnnnnnnnnnnnnnnnnnnnnnnnnnnnnnnnnnnnnnnnnnnnnnnnnnnnnnnnnnnnnnnnnnnnnnnnnnnnnnnnnnnnnnnnnnnnnnnnnnnnnnnnnnnnnnnnnnnnnnnnnnnnnnnnnnnnnnnnnnnnnnnnnnnnnnnnnnnnnnnnnnnnnnnnnnnnnnnnnnnnnnnnnnnnnnnnnnnnnnnnnnnnnnnnnnnnnnnnnnnnnnnnnnnnnnnnnnnnnnnnnnnnnnnnnnnnnnnnnnnnnnnnnnnnnnnnnnnnnnnnnnnnnnnnnnnnnnnnnnnnnnnnnnnnnnnnnnnnnnnnnnnnnnnnnnnnnnnnnnnnnnnnnnnnnnnnnnnnnnnnnnnnnnnnnnnnnnnnnnnnnnnnnnnnnnnnnnnnnnnnnnnnnnnnnnnnnnnnnnnnnnnnnnnnnnnnnnnnnnnnnnnnnnnnnnnnnnnnnnnnnnnnnnnnnnnnnnnnnnnnnnnnnnnnnnnnnnnnnnnnnnnnnnnnnnnnnnnnnnnnnnnnnnnnnnnnnnnnnnnnnnnnnnnnnnnnnnnnnnnnnnnnnnnnnnnnnnnnnnnnnnnnnnnnnnnnnnnnnnnnnnnnnnnnnnnnnnnnnnnnnnnnnnnnnnnnnnnnnnnnnnnnnnnnnnnnnnnnnnnnnnnnnnnnnnnnnnnnnnnnnnnnnnnnnnnnnnnnnnnnnnnnnnnnnnnnnnnnnnnnnnnnnnnnnnnnnnnnnnnnnnnnnnnnnnnnnnnnnnnnnnnnnnnnnnnnnnnnnnnnnnnnnnnnnnnnnnnnnnnnnnnnnnnnnnnnnnnnnnnnnnnnnnnnnnnnnnnnnnnnnnnnnnnnnnnnnnnnnnnnnnnnnnnnnnnnnnnnnnnnnnnnnnnnnnnnnnnnnnnnnnnnnnnnnnnnnnnnnnnnnnnnnnnnnnnnnnnnnnnnnnnnnnnnnnnnnnnnnnnnnnnnnnnnnnnnnnnnnnnnnnnnnnnnnnnnnnnnnnnnnnnnnnnnnnnnnnnnnnnnnnnnnnnnnnnnnnnnnnnnnnnnnnnnnnnnnnnnnnnnnnnnnnnnnnnnnnnnnnnnnnnnnnnnnnnnnnnnnnnnnnnnnnnnnnnnnnnnnnnnnnnnnnnnnnnnnnnnnnnnnnnnnnnnnnnnnnnnnnnnnnnnnnnnnnnnnnnnnnnnnnnnnnnnnnnnnnnnnnnnnnnnnnnnnnnnnnnnnnnnnnnnnnnnnnnnnnnnnnnnnnnnnnnnnnnnnnnnnnnnnnnnnnnnnnnnnnnnnnnnnnnnnnnnnnnnnnnnnnnnnnnnnnnnnnnnnnnnnnnnnnnnnnnnnnnnnnnnnnnnnnnnnnnnnnnnnnnnnnnnnnnnnnnnnnnnnnnnnnnnnnnnnnnnnnnnnnnnnnnnnnnnnnnnnnnnnnnnnnnnnnnnnnnnnnnnnnnnnnnnnnnnnnnnnnnnnnnnnnnnnnnnnnnnnnnnnnnnnnnnnnnnnnnnnnnnnnnnnnnnnnnnnnnnnnnnnnnnnnnnnnnnnnnnnnnnnnnnnnnnnnnnnnnnnnnnnnnnnnnnnnnnnnnnnnnnnnnnnnnnnnnnnnnnnnnnnnnnnnnnnnnnnnnnnnnnnnnnnnnnnnnnnnnnnnnnnnnnnnnnnnnnnnnnnnnnnnnnnnnnnnnnnnnnnnnnnnnnnnnnnnnnnnnnnnnnnnnnnnnnnnnnnnnnnnnnnnnnnnnnnnnnnnnnnnnnnnnnnnnnnnnnnnnnnnnnnnnnnnnnnnnnnnnnnnnnnnnnnnnnnnnnnnnnnnnnnnnnnnnnnnnnnnnnnnnnnnnnnnnnnnnnnnnnnnnnnnnnnnnnnnnnnnnnnnnnnnnnnnnnnnnnnnnnnnnnnnnnnnnnnnnnnnnnnnnnnnnnnnnnnnnnnnnnnnnnnnnnnnnnnnnnnnnnnnnnnnnnnnnnnnnnnnnnnnnnnnnnnnnnnnnnnnnnnnnnnnnnnnnnnnnnnnnnnnnnnnnnnnnnnnnnnnnnnnnnnnnnnnnnnnnnnnnnnnnnnnnnnnnnnnnnnnnnnnnnnnnnnnnnnnnnnnnnnnnnnnnnnnnnnnnnnnnnnnnnnnnnnnnnnnnnnnnnnnnnnnnnnnnnnnnnnnnnnnnnnnnnnnnnnnnnnnnnnnnnnnnnnnnnnnnnnnnnnnnnnnnnnnnnnnnnnnnnnnnnnnnnnnnnnnnnnnnnnnnnnnnnnnnnnnnnnnnnnnnnnnnnnnnnnnnnnnnnnnnnnnnnnnnnnnnnnnnnnnnnnnnnnnnnnnnnnnnnnnnnnnnnnnnnnnnnnnnnnnnnnnnnnnnnnnnnnnnnnnnnnnnnnnnnnnnnnnnnnnnnnnnnnnnnnnnnnnnnnnnnnnnnnnnnnnnnnnnnnnnnnnnnnnnnnnnnnnnnnnnnnnnnnnnnnnnnnnnnnnnnnnnnnnnnnnnnnnnnnnnnnnnnnnnnnnnnnnnnnnnnnnnnnnnnnnnnnnnnnnnnnnnnnnnnnnnnnnnnnnnnnnnnnnnnnnnnnnnnnnnnnnnnnnnnnnnnnnnnnnnnnnnnnnnnnnnnnnnnnnnnnnnnnnnnnnnnnnnnnnnnnnnnnnnnnnnnnnnnnnnnnnnnnnnnnnnnnnnnnnnnnnnnnnnnnnnnnnnnnnnnnnnnnnnnnnnnnnnnnnnnnnnnnnnnnnnnnnnnnnnnnnnnnnnnnnnnnnnnnnnnnnnnnnnnnnnnnnnnnnnnnnnnnnnnnnnnnnnnnnnnnnnnnnnnnnnnnnnnnnnnnnnnnnnnnnnnnnnnnnnnnnnnnnnnnnnnnnnnnnnnnnnnnnnnnnnnnnnnnnnnnnnnnnnnnnnnnnnnnnnnnnnnnnnnnnnnnnnnnnnnnnnnnnnnnnnnnnnnnnnnnnnnnnnnnnnnnnnnnnnnnnnnnnnnnnnnnnnnnnnnnnnnnnnnnnnnnnnnnnnnnnnnnnnnnnnnnnnnnnnnnnnnnnnnnnnnnnnnnnnnnnnnnnnnnnnnnnnnnnnnnnnnnnnnnnnnnnnnnnnnnnnnnnnnnnnnnnnnnnnnnnnnnnnnnnnnnnnnnnnnnnnnnnnnnnnnnnnnnnnnnnnnnnnnnnnnnnnnnnnnnnnnnnnnnnnnnnnnnnnnnnnnnnnnnnnnnnnnnnnnnnnnnnnnnnnnnnnnnnnnnnnnnnnnnnnnnnnnnnnnnnnnnnnnnnnnnnnnnnnnnnnnnnnnnnnnnnnnnnnnnnnnnnnnnnnnnnnnnnnnnnnnnnnnnnnnnnnnnnnnnnnnnnnnnnnnnnnnnnnnnnnnnnnnnnnnnnnnnnnnnnnnnnnnnnnnnnnnnnnnnnnnnnnnnnnnnnnnnnnnnnnnnnnnnnnnnnnnnnnnnnnnnnnnnnnnnnnnnnnnnnnnnnnnnnnnnnnnnnnnnnnnnnnnnnnnnnnnnnnnnnnnnnnnnnnnnnnnnnnnnnnnnnnnnnnnnnnnnnnnnnnnnnnnnnnnnnnnnnnnnnnnnnnnnnnnnnnnnnnnnnnnnnnnnnnnnnnnnnnnnnnnnnnnnnnnnnnnnnnnnnnnnnnnnnnnnnnnnnnnnnnnnnnnnnnnnnnnnnnnnnnnnnnnnnnnnnnnnnnnnnnnnnnnnnnnnnnnnnnnnnnnnnnnnnnnnnnnnnnnnnnnnnnnnnnnnnnnnnnnnnnnnnnnnnnnnnnnnnnnnnnnnnnnnnnnnnnnnnnnnnnnnnnnnnnnnnnnnnnnnnnnnnnnnnnnnnnnnnnnnnnnnnnnnnnnnnnnnnnnnnnnnnnnnnnnnnnnnnnnnnnnnnnnnnnnnnnnnnnnnnnnnnnnnnnnnnnnnnnnnnnnnnnnnnnnnnnnnnnnnnnnnnnnnnnnnnnnnnnnnnnnnnnnnnnnnnnnnnnnnnnnnnnnnnnnnnnnnnnnnnnnnnnnnnnnnnnnnnnnnnnnnnnnnnnnnnnnnnnnnnnnnnnnnnnnnnnnnnnnnnnnnnnnnnnnnnnnnnnnnnnnnnnnnnnnnnnnnnnnnnnnnnnnnnnnnnnnnnnnnnnnnnnnnnnnnnnnnnnnnnnnnnnnnnnnnnnnnnnnnnnnnnnnnnnnnnnnnnnnnnnnnnnnnnnnnnnnnnnnnnnnnnnnnnnnnnnnnnnnnnnnnnnnnnnnnnnnnnnnnnnnnnnnnnnnnnnnnnnnnnnnnnnnnnnnnnnnnnnnnnnnnnnnnnnnnnnnnnnnnnnnnnnnnnnnnnnnnnnnnnnnnnnnnnnnnnnnnnnnnnnnnnnnnnnnnnnnnnnnnnnnnnnnnnnnnnnnnnnnnnnnnnnnnnnnnnnnnnnnnnnnnnnnnnnnnnnnnnnnnnnnnnnnnnnnnnnnnnnnnnnnnnnnnnnnnnnnnnnnnnnnnnnnnnnnnnnnnnnnnnnnnnnnnnnnnnnnnnnnnnnnnnnnnnnnnnnnnnnnnnnnnnnnnnnnnnnnnnnnnnnnnnnnnnnnnnnnnnnnnnnnnnnnnnnnnnnnnnnnnnnnnnnnnnnnnnnnnnnnnnnnnnnnnnnnnnnnnnnnnnnnnnnnnnnnnnnnnnnnnnnnnnnnnnnnnnnnnnnnnnnnnnnnnnnnnnnnnnnnnnnnnnnnnnnnnnnnnnnnnnnnnnnnnnnnnnnnnnnnnnnnnnnnnnnnnnnnnnnnnnnnnnnnnnnnnnnnnnnnnnnnnnnnnnnnnnnnnnnnnnnnnnnnnnnnnnnnnnnnnnnnnnnnnnnnnnnnnnnnnnnnnnnnnnnnnnnnnnnnnnnnnnnnnnnnnnnnnnnnnnnnnnnnnnnnnnnnnnnnnnnnnnnnnnnnnnnnnnnnnnnnnnnnnnnnnnnnnnnnnnnnnnnnnnnnnnnnnnnnnnnnnnnnnnnnnnnnnnnnnnnnnnnnnnnnnnnnnnnnnnnnnnnnnnnnnnnnnnnnnnnnnnnnnnnnnnnnnnnnnnnnnnnnnnnnnnnnnnnnnnnnnnnnnnnnnnnnnnnnnnnnnnnnnnnnnnnnnnnnnnnnnnnnnnnnnnnnnnnnnnnnnnnnnnnnnnnnnnnnnnnnnnnnnnnnnnnnnnnnnnnnnnnnnnnnnnnnnnnnnnnnnnnnnnnnnnnnnnnnnnnnnnnnnnnnnnnnnnnnnnnnnnnnnnnnnnnnnnnnnnnnnnnnnnnnnnnnnnnnnnnnnnnnnnnnnnnnnnnnnnnnnnnnnnnnnnnnnnnnnnnnnnnnnnnnnnnnnnnnnnnnnnnnnnnnnnnnnnnnnnnnnnnnnnnnnnnnnnnnnnnnnnnnnnnnnnnnnnnnnnnnnnnnnnnnnnnnnnnnnnnnnnnnnnnnnnnnnnnnnnnnnnnnnnnnnnnnnnnnnnnnnnnnnnnnnnnnnnnnnnnnnnnnnnnnnnnnnnnnnnnnnnnnnnnnnnnnnnnnnnnnnnnnnnnnnnnnnnnnnnnnnnnnnnnnnnnnnnnnnnnnnnnnnnnnnnnnnnnnnnnnnnnnnnnnnnnnnnnnnnnnnnnnnnnnnnnnnnnnnnnnnnnnnnnnnnnnnnnnnnnnnnnnnnnnnnnnnnnnnnnnnnnnnnnnnnnnnnnnnnnnnnnnnnnnnnnnnnnnnnnnnnnnnnnnnnnnnnnnnnnnnnnnnnnnnnnnnnnnnnnnnnnnnnnnnnnnnnnnnnnnnnnnnnnnnnnnnnnnnnnnnnnnnnnnnnnnnnnnnnnnnnnnnnnnnnnnnnnnnnnnnnnnnnnnnnnnnnnnnnnnnnnnnnnnnnnnnnnnnnnnnnnnnnnnnnnnnnnnnnnnnnnnnnnnnnnnnnnnnnnnnnnnnnnnnnnnnnnnnnnnnnnnnnnnnnnnnnnnnnnnnnnnnnnnnnnnnnnnnnnnnnnnnnnnnnnnnnnnnnnnnnnnnnnnnnnnnnnnnnnnnnnnnnnnnnnnnnnnnnnnnnnnnnnnnnnnnnnnnnnnnnnnnnnnnnnnnnnnnnnnnnnnnnnnnnnnnnnnnnnnnnnnnnnnnnnnnnnnnnnnnnnnnnnnnnnnnnnnnnnnnnnnnnnnnnnnnnnnnnnnnnnnnnnnnnnnnnnnnnnnnnnnnnnnnnnnnnnnnnnnnnnnnnnnnnnnnnnnnnnnnnnnnnnnnnnnnnnnnnnnnnnnnnnnnnnnnnnnnnnnnnnnnnnnnnnnnnnnnnnnnnnnnnnnnnnnnnnnnnnnnnnnnnnnnnnnnnnnnnnnnnnnnnnnnnnnnnnnnnnnnnnnnnnnnnnnnnnnnnnnnnnnnnnnnnnnnnnnnnnnnnnnnnnnnnnnnnnnnnnnnnnnnnnnnnnnnnnnnnnnnnnnnnnnnnnnnnnnnnnnnnnnnnnnnnnnnnnnnnnnnnnnnnnnnnnnnnnnnnnnnnnnnnnnnnnnnnnnnnnnnnnnnnnnnnnnnnnnnnnnnnnnnnnnnnnnnnnnnnnnnnnnnnnnnnnnnnnnnnnnnnnnnnnnnnnnnnnnnnnnnnnnnnnnnnnnnnnnnnnnnnnnnnnnnnnnnnnnnnnnnnnnnnnnnnnnnnnnnnnnnnnnnnnnnnnnnnnnnnnnnnnnnnnnnnnnnnnnnnnnnnnnnnnnnnnnnnnnnnnnnnnnnnnnnnnnnnnnnnnnnnnnnnnnnnnnnnnnnnnnnnnnnnnnnnnnnnnnnnnnnnnnnnnnnnnnnnnnnnnnnnnnnnnnnnnnnnnnnnnnnnnnnnnnnnnnnnnnnnnnnnnnnnnnnnnnnnnnnnnnnnnnnnnnnnnnnnnnnnnnnnnnnnnnnnnnnnnnnnnnnnnnnnnnnnnnnnnnnnnnnnnnnnnnnnnnnnnnnnnnnnnnnnnnnnnnnnnnnnnnnnnnnnnnnnnnnnnnnnnnnnnnnnnnnnnnnnnnnnnnnnnnnnnnnnnnnnnnnnnnnnnnnnnnnnnnnnnnnnnnnnnnnnnnnnnnnnnnnnnnnnnnnnnnnnnnnnnnnnnnnnnnnnnnnnnnnnnnnnnnnnnnnnnnnnnnnnnnnnnnnnnnnnnnnnnnnnnnnnnnnnnnnnnnnnnnnnnnnnnnnnnnnnnnnnnnnnnnnnnnnnnnnnnnnnnnnnnnnnnnnnnnnnnnnnnnnnnnnnnnnnnnnnnnnnnnnnnnnnnnnnnnnnnnnnnnnnnnnnnnnnnnnnnnnnnnnnnnnnnnnnnnnnnnnnnnnnnnnnnnnnnnnnnnnnnnnnnnnnnnnnnnnnnnnnnnnnnnnnnnnnnnnnnnnnnnnnnnnnnnnnnnnnnnnnnnnnnnnnnnnnnnnnnnnnnnnnnnnnnnnnnnnnnnnnnnnnnnnnnnnnnnnnnnnnnnnnnnnnnnnnnnnnnnnnnnnnnnnnnnnnnnnnnnnnnnnnnnnnnnnnnnnnnnnnnnnnnnnnnnnnnnnnnnnnnnnnnnnnnnnnnnnnnnnnnnnnnnnnnnnnnnnnnnnnnnnnnnnnnnnnnnnnnnnnnnnnnnnnnnnnnnnnnnnnnnnnnnnnnnnnnnnnnnnnnnnnnnnnnnnnnnnnnnnnnnnnnnnnnnnnnnnnnnnnnnnnnnnnnnnnnnnnnnnnnnnnnnnnnnnnnnnnnnnnnnnnnnnnnnnnnnnnnnnnnnnnnnnnnnnnnnnnnnnnnnnnnnnnnnnnnnnnnnnnnnnnnnnnnnnnnnnnnnnnnnnnnnnnnnnnnnnnnnnnnnnnnnnnnnnnnnnnnnnnnnnnnnnnnnnnnnnnnnnnnnnnnnnnnnnnnnnnnnnnnnnnnnnnnnnnnnnnnnnnnnnnnnnnnnnnnnnnnnnnnnnnnnnnnnnnnnnnnnnnnnnnnnnnnnnnnnnnnnnnnnnnnnnnnnnnnnnnnnnnnnnnnnnnnnnnnnnnnnnnnnnnnnnnnnnnnnnnnnnnnnnnnnnnnnnnnnnnnnnnnnnnnnnnnnnnnnnnnnnnnnnnnnnnnnnnnnnnnnnnnnnnnnnnnnnnnnnnnnnnnnnnnnnnnnnnnnnnnnnnnnnnnnnnnnnnnnnnnnnnnnnnnnnnnnnnnnnnnnnnnnnnnnnnnnnnnnnnnnnnnnnnnnnnnnnnnnnnnnnnnnnnnnnnnnnnnnnnnnnnnnnnnnnnnnnnnnnnnnnnnnnnnnnnnnnnnnnnnnnnnnnnnnnnnnnnnnnnnnnnnnnnnnnnnnnnnnnnnnnnnnnnnnnnnnnnnnnnnnnnnnnnnnnnnnnnnnnnnnnnnnnnnnnnnnnnnnnnnnnnnnnnnnnnnnnnnnnnnnnnnnnnnnnnnnnnnnnnnnnnnnnnnnnnnnnnnnnnnnnnnnnnnnnnnnnnnnnnnnnnnnnnnnnnnnnnnnnnnnnnnnnnnnnnnnnnnnnnnnnnnnnnnnnnnnnnnnnnnnnnnnnnnnnnnnnnnnnnnnnnnnnnnnnnnnnnnnnnnnnnnnnnnnnnnnnnnnnnnnnnnnnnnnnnnnnnnnnnnnnnnnnnnnnnnnnnnnnnnnnnnnnnnnnnnnnnnnnnnnnnnnnnnnnnnnnnnnnnnnnnnnnnnnnnnnnnnnnnnnnnnnnnnnnnnnnnnnnnnnnnnnnnnnnnnnnnnnnnnnnnnnnnnnnnnnnnnnnnnnnnnnnnnnnnnnnnnnnnnnnnnnnnnnnnnnnnnnnnnnnnnnnnnnnnnnnnnnnnnnnnnnnnnnnnnnnnnnnnnnnnnnnnnnnnnnnnnnnnnnnnnnnnnnnnnnnnnnnnnnnnnnnnnnnnnnnnnnnnnnnnnnnnnnnnnnnnnnnnnnnnnnnnnnnnnnnnnnnnnnnnnnnnnnnnnnnnnnnnnnnnnnnnnnnnnnnnnnnnnnnnnnnnnnnnnnnnnnnnnnnnnnnnnnnnnnnnnnnnnnnnnnnnnnnnnnnnnnnnnnnnnnnnnnnnnnnnnnnnnnnnnnnnnnnnnnnnnnnnnnnnnnnnnnnnnnnnnnnnnnnnnnnnnnnnnnnnnnnnnnnnnnnnnnnnnnnnnnnnnnnnnnnnnnnnnnnnnnnnnnnnnnnnnnnnnnnnnnnnnnnnnnnnnnnnnnnnnnnnnnnnnnnnnnnnnnnnnnnnnnnnnnnnnnnnnnnnnnnnnnnnnnnnnnnnnnnnnnnnnnnnnnnnnnnnnnnnnnnnnnnnnnnnnnnnnnnnnnnnnnnnnnnnnnnnnnnnnnnnnnnnnnnnnnnnnnnnnnnnnnnnnnnnnnnnnnnnnnnnnnnnnnnnnnnnnnnnnnnnnnnnnnnnnnnnnnnnnnnnnnnnnnnnnnnnnnnnnnnnnnnnnnnnnnnnnnnnnnnnnnnnnnnnnnnnnnnnnnnnnnnnnnnnnnnnnnnnnnnnnnnnnnnnnnnnnnnnnnnnnnnnnnnnnnnnnnnnnnnnnnnnnnnnnnnnnnnnnnnnnnnnnnnnnnnnnnnnnnnnnnnnnnnnnnnnnnnnnnnnnnnnnnnnnnnnnnnnnnnnnnnnnnnnnnnnnnnnnnnnnnnnnnnnnnnnnnnnnnnnnnnnnnnnnnnnnnnnnnnnnnnnnnnnnnnnnnnnnnnnnnnnnnnnnnnnnnnnnnnnnnnnnnnnnnnnnnnnnnnnnnnnnnnnnnnnnnnnnnnnnnnnnnnnnnnnnnnnnnnnnnnnnnnnnnnnnnnnnnnnnnnnnnnnnnnnnnnnnnnnnnnnnnnnnnnnnnnnnnnnnnnnnnnnnnnnnnnnnnnnnnnnnnnnnnnnnnnnnnnnnnnnnnnnnnnnnnnnnnnnnnnnnnnnnnnnnnnnnnnnnnnnnnnnnnnnnnnnnnnnnnnnnnnnnnnnnnnnnnnnnnnnnnnnnnnnnnnnnnnnnnnnnnnnnnnnnnnnnnnnnnnnnnnnnnnnnnnnnnnnnnnnnnnnnnnnnnnnnnnnnnnnnnnnnnnnnnnnnnnnnnnnnnnnnnnnnnnnnnnnnnnnnnnnnnnnnnnnnnnnnnnnnnnnnnnnnnnnnnnnnnnnnnnnnnnnnnnnnnnnnnnnnnnnnnnnnnnnnnnnnnnnnnnnnnnnnnnnnnnnnnnnnnnnnnnnnnnnnnnnnnnnnnnnnnnnnnnnnnnnnnnnnnnnnnnnnnnnnnnnnnnnnnnnnnnnnnnnnnnnnnnnnnnnnnnnnnnnnnnnnnnnnnnnnnnnnnnnnnnnnnnnnnnnnnnnnnnnnnnnnnnnnnnnnnnnnnnnnnnnnnnnnnnnnnnnnnnnnnnnnnnnnnnnnnnnnnnnnnnnnnnnnnnnnnnnnnnnnnnnnnnnnnnnnnnnnnnnnnnnnnnnnnnnnnnnnnnnnnnnnnnnnnnnnnnnnnnnnnnnnnnnnnnnnnnnnnnnnnnnnnnnnnnnnnnnnnnnnnnnnnnnnnnnnnnnnnnnnnnnnnnnnnnnnnnnnnnnnnnnnnnnnnnnnnnnnnnnnnnnnnnnnnnnnnnnnnnnnnnnnnnnnnnnnnnnnnnnnnnnnnnnnnnnnnnnnnnnnnnnnnnnnnnnnnnnnnnnnnnnnnnnnnnnnnnnnnnnnnnnnnnnnnnnnnnnnnnnnnnnnnnnnnnnnnnnnnnnnnnnnnnnnnnnnnnnnnnnnnnnnnnnnnnnnnnnnnnnnnnnnnnnnnnnnnnnnnnnnnnnnnnnnnnnnnnnnnnnnnnnnnnnnnnnnnnnnnnnnnnnnnnnnnnnnnnnnnnnnnnnnnnnnnnnnnnnnnnnnnnnnnnnnnnnnnnnnnnnnnnnnnnnnnnnnnnnnnnnnnnnnnnnnnnnnnnnnnnnnnnnnnnnnnnnnnnnnnnnnnnnnnnnnnnnnnnnnnnnnnnnnnnnnnnnnnnnnnnnnnnnnnnnnnnnnnnnnnnnnnnnnnnnnnnnnnnnnnnnnnnnnnnnnnnnnnnnnnnnnnnnnnnnnnnnnnnnnnnnnnnnnnnnnnnnnnnnnnnnnnnnnnnnnnnnnnnnnnnnnnnnnnnnnnnnnnnnnnnnnnnnnnnnnnnnnnnnnnnnnnnnnnnnnnnnnnnnnnnnnnnnnnnnnnnnnnnnnnnnnnnnnnnnnnnnnnnnnnnnnnnnnnnnnnnnnnnnnnnnnnnnnnnnnnnnnnnnnnnnnnnnnnnnnnnnnnnnnnnnnnnnnnnnnnnnnnnnnnnnnnnnnnnnnnnnnnnnnnnnnnnnnnnnnnnnnnnnnnnnnnnnnnnnnnnnnnnnnnnnnnnnnnnnnnnnnnnnnnnnnnnnnnnnnnnnnnnnnnnnnnnnnnnnnnnnnnnnnnnnnnnnnnnnnnnnnnnnnnnnnnnnnnnnnnnnnnnnnnnnnnnnnnnnnnnnnnnnnnnnnnnnnnnnnnnnnnnnnnnnnnnnnnnnnnnnnnnnnnnnnnnnnnnnnnnnnnnnnnnnnnnnnnnnnnnnnnnnnnnnnnnnnnnnnnnnnnnnnnnnnnnnnnnnnnnnnnnnnnnnnnnnnnnnnnnnnnnnnnnnnnnnnnnnnnnnnnnnnnnnnnnnnnnnnnnnnnnnnnnnnnnnnnnnnnnnnnnnnnnnnnnnnnnnnnnnnnnnnnnnnnnnnnnnnnnnnnnnnnnnnnnnnnnnnnnnnnnnnnnnnnnnnnnnnnnnnnnnnnnnnnnnnnnnnnnnnnnnnnnnnnnnnnnnnnnnnnnnnnnnnnnnnnnnnnnnnnnnnnnnnnnnnnnnnnnnnnnnnnnnnnnnnnnnnnnnnnnnnnnnnnnnnnnnnnnnnnnnnnnnnnnnnnnnnnnnnnnnnnnnnnnnnnnnnnnnnnnnnnnnnnnnnnnnnnnnnnnnnnnnnnnnnnnnnnnnnnnnnnnnnnnnnnnnnnnnnnnnnnnnnnnnnnnnnnnnnnnnnnnnnnnnnnnnnnnnnnnnnnnnnnnnnnnnnnnnnnnnnnnnnnnnnnnnnnnnnnnnnnnnnnnnnnnnnnnnnnnnnnnnnnnnnnnnnnnnnnnnnnnnnnnnnnnnnnnnnnnnnnnnnnnnnnnnnnnnnnnnnnnnnnnnnnnnnnnnnnnnnnnnnnnnnnnnnnnnnnnnnnnnnnnnnnnnnnnnnnnnnnnnnnnnnnnnnnnnnnnnnnnnnnnnnnnnnnnnnnnnnnnnnnnnnnnnnnnnnnnnnnnnnnnnnnnnnnnnnnnnnnnnnnnnnnnnnnnnnnnnnnnnnnnnnnnnnnnnnnnnnnnnnnnnnnnnnnnnnnnnnnnnnnnnnnnnnnnnnnnnnnnnnnnnnnnnnnnnnnnnnnnnnnnnnnnnnnnnnnnnnnnnnnnnnnnnnnnnnnnnnnnnnnnnnnnnnnnnnnnnnnnnnnnnnnnnnnnnnnnnnnnnnnnnnnnnnnnnnnnnnnnnnnnnnnnnnnnnnnnnnnnnnnnnnnnnnnnnnnnnnnnnnnnnnnnnnnnnnnnnnnnnnnnnnnnnnnnnnnnnnnnnnnnnnnnnnnnnnnnnnnnnnnnnnnnnnnnnnnnnnnnnnnnnnnnnnnnnnnnnnnnnnnnnnnnnnnnnnnnnnnnnnnnnnnnnnnnnnnnnnnnnnnnnnnnnnnnnnnnnnnnnnnnnnnnnnnnnnnnnnnnnnnnnnnnnnnnnnnnnnnnnnnnnnnnnnnnnnnnnnnnnnnnnnnnnnnnnnnnnnnnnnnnnnnnnnnnnnnnnnnnnnnnnnnnnnnnnnnnnnnnnnnnnnnnnnnnnnnnnnnnnnnnnnnnnnnnnnnnnnnnnnnnnnnnnnnnnnnnnnnnnnnnnnnnnnnnnnnnnnnnnnnnnnnnnnnnnnnnnnnnnnnnnnnnnnnnnnnnnnnnnnnnnnnnnnnnnnnnnnnnnnnnnnnnnnnnnnnnnnnnnnnnnnnnnnnnnnnnnnnnnnnnnnnnnnnnnnnnnnnnnnnnnnnnnnnnnnnnnnnnnnnnnnnnnnnnnnnnnnnnnnnnnnnnnnnnnnnnnnnnnnnnnnnnnnnnnnnnnnnnnnnnnnnnnnnnnnnnnnnnnnnnnnnnnnnnnnnnnnnnnnnnnnnnnnnnnnnnnnnnnnnnnnnnnnnnnnnnnnnnnnnnnnnnnnnnnnnnnnnnnnnnnnnnnnnnnnnnnnnnnnnnnnnnnnnnnnnnnnnnnnnnnnnnnnnnnnnnnnnnnnnnnnnnnnnnnnnnnnnnnnnnnnnnnnnnnnnnnnnnnnnnnnnnnnnnnnnnnnnnnnnnnnnnnnnnnnnnnnnnnnnnnnnnnnnnnnnnnnnnnnnnnnnnnnnnnnnnnnnnnnnnnnnnnnnnnnnnnnnnnnnnnnnnnnnnnnnnnnnnnnnnnnnnnnnnnnnnnnnnnnnnnnnnnnnnnnnnnnnnnnnnnnnnnnnnnnnnnnnnnnnnnnnnnnnnnnnnnnnnnnnnnnnnnnnnnnnnnnnnnnnnnnnnnnnnnnnnnnnnnnnnnnnnnnnnnnnnnnnnnnnnnnnnnnnnnnnnnnnnnnnnnnnnnnnnnnnnnnnnnnnnnnnnnnnnnnnnnnnnnnnnnnnnnnnnnnnnnnnnnnnnnnnnnnnnnnnnnnnnnnnnnnnnnnnnnnnnnnnnnnnnnnnnnnnnnnnnnnnnnnnnnnnnnnnnnnnnnnnnnnnnnnnnnnnnnnnnnnnnnnnnnnnnnnnnnnnnnnnnnnnnnnnnnnnnnnnnnnnnnnnnnnnnnnnnnnnnnnnnnnnnnnnnnnnnnnnnnnnnnnnnnnnnnnnnnnnnnnnnnnnnnnnnnnnnnnnnnnnnnnnnnnnnnnnnnnnnnnnnnnnnnnnnnnnnnnnnnnnnnnnnnnnnnnnnnnnnnnnnnnnnnnnnnnnnnnnnnnnnnnnnnnnnnnnnnnnnnnnnnnnnnnnnnnnnnnnnnnnnnnnnnnnnnnnnnnnnnnnnnnnnnnnnnnnnnnnnnnnnnnnnnnnnnnnnnnnnnnnnnnnnnnnnnnnnnnnnnnnnnnnnnnnnnnnnnnnnnnnnnnnnnnnnnnnnnnnnnnnnnnnnnnnnnnnnnnnnnnnnnnnnnnnnnnnnnnnnnnnnnnnnnnnnnnnnnnnnnnnnnnnnnnnnnnnnnnnnnnnnnnnnnnnnnnnnnnnnnnnnnnnnnnnnnnnnnnnnnnnnnnnnnnnnnnnnnnnnnnnnnnnnnnnnnnnnnnnnnnnnnnnnnnnnnnnnnnnnnnnnnnnnnnnnnnnnnnnnnnnnnnnnnnnnnnnnnnnnnnnnnnnnnnnnnnnnnnnnnnnnnnnnnnnnnnnnnnnnnnnnnnnnnnnnnnnnnnnnnnnnnnnnnnnnnnnnnnnnnnnnnnnnnnnnnnnnnnnnnnnnnnnnnnnnnnnnnnnnnnnnnnnnnnnnnnnnnnnnnnnnnnnnnnnnnnnnnnnnnnnnnnnnnnnnnnnnnnnnnnnnnnnnnnnnnnnnnnnnnnnnnnnnnnnnnnnnnnnnnnnnnnnnnnnnnnnnnnnnnnnnnnnnnnnnnnnnnnnnnnnnnnnnnnnnnnnnnnnnnnnnnnnnnnnnnnnnnnnnnnnnnnnnnnnnnnnnnnnnnnnnnnnnnnnnnnnnnnnnnnnnnnnnnnnnnnnnnnnnnnnnnnnnnnnnnnnnnnnnnnnnnnnnnnnnnnnnnnnnnnnnnnnnnnnnnnnnnnnnnnnnnnnnnnnnnnnnnnnnnnnnnnnnnnnnnnnnnnnnnnnnnnnnnnnnnnnnnnnnnnnnnnnnnnnnnnnnnnnnnnnnnnnnnnnnnnnnnnnnnnnnnnnnnnnnnnnnnnnnnnnnnnnnnnnnnnnnnnnnnnnnnnnnnnnnnnnnnnnnnnnnnnnnnnnnnnnnnnnnnnnnnnnnnnnnnnnnnnnnnnnnnnnnnnnnnnnnnnnnnnnnnnnnnnnnnnnnnnnnnnnnnnnnnnnnnnnnnnnnnnnnnnnnnnnnnnnnnnnnnnnnnnnnnnnnnnnnnnnnnnnnnnnnnnnnnnnnnnnnnnnnnnnnnnnnnnnnnnnnnnnnnnnnnnnnnnnnnnnnnnnnnnnnnnnnnnnnnnnnnnnnnnnnnnnnnnnnnnnnnnnnnnnnnnnnnnnnnnnnnnnnnnnnnnnnnnnnnnnnnnnnnnnnnnnnnnnnnnnnnnnnnnnnnnnnnnnnnnnnnnnnnnnnnnnnnnnnnnnnnnnnnnnnnnnnnnnnnnnnnnnnnnnnnnnnnnnnnnnnnnnnnnnnnnnnnnnnnnnnnnnnnnnnnnnnnnnnnnnnnnnnnnnnnnnnnnnnnnnnnnnnnnnnnnnnnnnnnnnnnnnnnnnnnnnnnnnnnnnnnnnnnnnnnnnnnnnnnnnnnnnnnnnnnnnnnnnnnnnnnnnnnnnnnnnnnnnnnnnnnnnnnnnnnnnnnnnnnnnnnnnnnnnnnnnnnnnnnnnnnnnnnnnnnnnnnnnnnnnnnnnnnnnnnnnnnnnnnnnnnnnnnnnnnnnnnnnnnnnnnnnnnnnnnnnnnnnnnnnnnnnnnnnnnnnnnnnnnnnnnnnnnnnnnnnnnnnnnnnnnnnnnnnnnnnnnnnnnnnnnnnnnnnnnnnnnnnnnnnnnnnnnnnnnnnnnnnnnnnnnnnnnnnnnnnnnnnnnnnnnnnnnnnnnnnnnnnnnnnnnnnnnnnnnnnnnnnnnnnnnnnnnnnnnnnnnnnnnnnnnnnnnnnnnnnnnnnnnnnnnnnnnnnnnnnnnnnnnnnnnnnnnnnnnnnnnnnnnnnnnnnnnnnnnnnnnnnnnnnnnnnnnnnnnnnnnnnnnnnnnnnnnnnnnnnnnnnnnnnnnnnnnnnnnnnnnnnnnnnnnnnnnnnnnnnnnnnnnnnnnnnnnnnnnnnnnnnnnnnnnnnnnnnnnnnnnnnnnnnnnnnnnnnnnnnnnnnnnnnnnnnnnnnnnnnnnnnnnnnnnnnnnnnnnnnnnnnnnnnnnnnnnnnnnnnnnnnnnnnnnnnnnnnnnnnnnnnnnnnnnnnnnnnnnnnnnnnnnnnnnnnnnnnnnnnnnnnnnnnnnnnnnnnnnnnnnnnnnnnnnnnnnnnnnnnnnnnnnnnnnnnnnnnnnnnnnnnnnnnnnnnnnnnnnnnnnnnnnnnnnnnnnnnnnnnnnnnnnnnnnnnnnnnnnnnnnnnnnnnnnnnnnnnnnnnnnnnnnnnnnnnnnnnnnnnnnnnnnnnnnnnnnnnnnnnnnnnnnnnnnnnnnnnnnnnnnnnnnnnnnnnnnnnnnnnnnnnnnnnnnnnnnnnnnnnnnnnnnnnnnnnnnnnnnnnnnnnnnnnnnnnnnnnnnnnnnnnnnnnnnnnnnnnnnnnnnnnnnnnnnnnnnnnnnnnnnnnnnnnnnnnnnnnnnnnnnnnnnnnnnnnnnnnnnnnnnnnnnnnnnnncgtcaagtacaccacgcccaaccaaaagacgggcaaggacgatcaccacgaagtcgacgccgcagttgtgctgttgacggccgacgctgaggcccgtgttcggacagcgcttgaacagcccgcagcaacggcgcaaaccgacgccgaagcggacaagaagtttctgcgtgaaatctacgagccggtcgttgaaaaaactatcgcatccaccgccaaaggctcgcctttgcgccgccgcgcggcgaaagagcacgccaaagccctgctgaacaagaaaatcaaagaactggttgagaagccggatcatccgtcgaacgcagatgcaccagcagccgtgactgacaaaccgaaacgcggccacaagaagggaggcacagaatgagccagaccgctgaatacatcaagaggcttgcagacttgcaggaaggcgagcgctcgcggctgcgccgtctggccggacggccgctcgacgcaacgctccagggtttcgacctcttcacgggcctctggtggccgttgcggaaggtaagttcggcgaccccgcgccgggagccgtcatggctcgttgccaagctcttcggcgcgttccgcgtcccgcacatccgggccgattcaggcgcgggtccctctttgcctgaagtcctgggccgctgcgaaccgcacgacaaggatggccgcaagcgcttccgaactcgattcgacgcactgctttgctcgtccctgtcgtctcttgagccgcatttgcgctgggcgctaggggaagtcgccaaggcggtcgccgggcacgtgccgcatgcgcgggatgtgaaaggcatcgactgggtgcaactcctcgaccatctctccatttgggaccggggcgaggagcaccgcctcgatcgcgatattcgagatatatgggcggaacaatacctgaactcaaccaaaaaccaaaaatcaaaggaggactgaccatgttaattgaaatccacatgatccagaatcacagcccggcgaacctgaatcgggacgacctgggcgcgcccaagacctgcatcttcggcggcgtcacccgggcgcgcatttccagccagtgtctcaaacgcagcatccgccgcagcccggagttcgcggttgctttggagaaggatggaggtgtccgcacgcgcaggttggcgaatctgctggcgcggatcgcccatgctggagacttcgagttgacgcccgcaaagttggctgaacttctcaaagggaagtccatcgagaacgaagagacaaagaagctcgatgccattgctgcagaagccctggaactgggtggtgtgaagccaaaaagcaagaagaaagggaaaaagggcgaggaaggcgaggaaggcgaggacgccgaagcgctctccaagatgcttctcttcctctctacgacgacaatcgcgaagatggcgggagatctcaagaccgaatcagacgcaaaggcgcttaccgaaaagttcaagaaatacattgccgaaaatcccagcgtcccagacatcgctttgaatgggcgcatgactgaggttacaaagggtagcgttttcagcgacttgaacttcaccgtcgaagccgcgttgtccgcggcacacgccatctcgactcacgcggtcgtgaacgaggtagactacttcaccgctgccgacgacgtgcccggcgaggacgccggcgcgggtcaccttggcgaggccatgttcaactcggcctgtttctacaagcatttcgtcattgacttcgagcagttgaagaagaacctagcgaacgatgccgacctcgcctgcaagacagtacggtccttccttgaagcagccgccaatgccaacccctccggcaaacaacacgcacacgcggcattcaatctacccgacggagttctggtcgaagtcaaaactgagtcggccacacccgtcagctacgccaacgctttcgctgatccggtgccggaaaagtccgaacgcggcttgatcggcgaaagcatcgctagacttggccagtacgcccacgatctcgttgtaggttacggcatcgaggccgaacgtttctggttctcgccgaatctgcgccatcgcctgacctggatcgacaagagcatgaaggaacacgagcaagaacaatccgtggtcggttccgacgagttcggcgagttcgatcagttcgtccataaggtcatgggcaagatgggggcaaccgggacttctgcggaggcggcgaaatgaccgaagccaacacactcttcctccgcctcgagggccccctccaggcctggggcgacacgtcaaagttcgtcatccggcggaccatggatgcgccgaccaagtccggcgtgctgggcctggtgtgctgcgccatgggcctgtcgcgccaggcggtgcgggaacgcctgccggagctgaacgggcttgcgatgggtgtgcgcatcgaccggcaaggcacgcggtggtgggattaccacacggtaggagcgggaatcggcatgacaaccgctagtggcggtctgaagaccggcgccaagggcacgctcatcacgcggcgcgagtacctgtgcgacgcttcctttctcgtagccctacagggcgaaccggcgcttattgccgaactggccgccgcgatgcgaaacccaaaatggacgatctacctgggaagaaaatcctgtcctatgtcccgtccgccgttggagcatcaccccggcgattatcccgatctgctctccgctctcacggcggttgactggcgtccgcgtctcaaaggagacacacaaacggaggcggtagactgccttctcgactgggttgccacgccggaagaaccggaagcgccgttcgacgcggaaatctggtatgacgttcccttgaccttcgagccgccctcgcatcggccccgatttgtcattcggcggcagatccaagtcggcgaaaagggtgcattgaaggttgcggagaagcccgcgcagaactacacaccgcgcccgccacgcgcgagagccgactaccgcaatagtgaatatcggaaaatgcgagaggagcggcttgatcgcgatcatcatctgtgcgtcttatgcaagtcgcccgcgaccaccgttcatcacttcacctatcgccatgccggtggcgatgaacgcctggacgagttgcggtcgctgtgtcgcctgtgccacgacgccgtgacaatgatcgaatacggccagggcatggggatggaccgcatcaaccccgaagaggagcgctggagggaccagatcatcgaaaaacgcgcgaagattatcgcgttccggtcgctcgaaacccaaacccggcgccgcaaactcgccgcagaggaggtcgaataatgtacatgtcccatctcatgattgatatcggcgacaatcccgaccggccacggcccggccgtctttggttgcgcgatgtctaccacgttcatcagcggctgtgcatggcgtttccatcggaggcgcgggtaaagcgcgatgtcgagtttcttcagccgttccaagaggacgacttcccgttgctgcgcaacccggacgttaagccggaagacccgcgccacagtttcctgttccgtattgataccggcatccaggacggcgcgcgaacggttattcttgtccagtcggcgctgaagccggattgggactatgccttccagaatgcgcgctttcttgccgccgatccggaatggaaggaatacgcccccacgttcgaggttggacaggaactccgcttccgcatccgcatcaatctgagcaagaagagcaaggatctccgaaatacgcgggaggaaacagatgcgtatggccgcccaaaatcgcagagcaagcgcgtggcggtgacctgggacaaggaccagaaacccgatgaggcgatccgcgcgtggtttggagccaaggctgtccgtaatggtttcgcgttggataactttcaactcgtgcatctcggttgggtctcgggataccgtggcaagacgaaagtgccgtccggcgaggatcgtcccaaacacaagatgcggttccgatccgcgctcatcgagggaacgctggcggtcacggacgcgccgtgcttttcgcaggcggtcgcttcgggtatcggttccgcgaaggccttcgggttcggcctgctttcgcttgcgccggtacgtgcgggatgatcgcccatgaggactaaagacctgcatgaactgccgaaagtccgcgacaaactgacgtacctctacgtcgagcattgccgcgttgatcaagaggcgaaggccatcgcgattcatgacgtttcgggtgtgacgcccgtgccgtgcgctgcgctcacgctgcttatgctcggcccagggaccaacatcacccacgccgccgtgctgacgctcgccgattgcggctgccttaccgtgtggtgcggcgagcaaggcgtccgcttctatgcccaaggcatgggcgagacccggaacgccggaaacctcttgcatcaagcaagcctgtgcacgcaccgcgcttcgcgcttgaaagttgtccggcgcatgtacgaaatgcgctttgccgagaacctcgacccggcccttacgatccagcaaattcgcgggcgcgaaggagtccgcgtccgcgacacctacgcccgcgcctcgcgcgaatccggggtcgcgtggcagggccgatcctacacccgcaaccaatggaagtccgccgatcccgtcaaccgtgccctgtcctcggccaactcctgcctctacggcatctgccacgccgcgatcgtggccgcaggctactcccccgcgcttggtttcatacacaccggcaaacaactctccttcgtgtacgacattgccgacctgtacaagtgcgatatgaccgtgcccctggcattccgcgtggccgccgagtgttccaaagacatcgaacgcgaagtcaggctccggtgccgcgatgcgttcgccgaacagggcatcctccaacatattgtctccgacatcgcatgtgcgctcgcaattccgtccgaagaggcggacgacgaacccgacttcgacgctgatcccgcacgccccggagcgctctgggaccccgatcagggcgcttgtcccggcggcgtacaatacgcgcccggcgaaccgcccgcagagtagaaaaccatggtcatcatgatactcgaaaccgtacccgccagcctgcgcggccaactcactcgttggatgatcgaacccaaagcgggcgtctttgtcggcaacatttccgccatggtccgccaaaagctctgggagaaagcctgccaaggagtccgagaaggcggcgctatcctcatctacagcgcaaagaacgaacaaggtttcaaaatcgacttctggggaaagacctcaagatggataacaaactgggagggacttcaactggtaacaagacccaaagagccctaaaatacatgtgtcttccccacgcacgtgggggtgaaccgccacgagacccttttgtgggccagtccctcaagtcttccccacgcacgtgggggtgaaccgaaccgaacccggaaaccgggcgcggaacatgcgtcttccccacgcacgtgggggtgaaccgacaaaagaacaacaacacaacagcacaacagcagtcttccccacgcacgtgggggtgaaccgccgcgtctaccgcgcaagcccattgaccggaggtcttccccacgcacgtgggggtgaaccgtgtaacggcaccggcgaaagcgagcatgtgcggtcttccccacgcacgtgggggtgaaccgcaatcgccgaggagctcgacattactgttgcagtcttccccacgcacgtgggggtgaaccgccaggatatagaagcgctcttggtcgagaattgtcttccccacgcacgtgggggtgaaccgagggcttgcagttgcttgccgagaaccgcgcggtcttccccacgcacgtgggggtgaaccgttcacatcatcgtgtgtggccgcgccggctacgtcttccccacgcacgtgggggtgaaccgccccattccgagttgattgccacaccaccacggtcttccccacgcacgtgggggtgaaccgcgatacgttgttcaggaaggcgataagtggctgtcttccccacgcacgtgggggtgaaccgacttagaaaatgcacctgagtggctcaaaaacgtcttccccacgcacgtgggggtgaaccgtcccaggagtagaagtcggttgagttgtaattgtcttccccacgcacgtgggggtgaaccggggtgttttgtgttcgcagagttctacggggagtcttccccacgcacgtgggggtgaaccggtgaagtctttgcgcgcgtgctcgagatcgcggtcttccccacgcacgtgggggtgaaccggagcacatcggcacgatgaaagcacagcccctgtcttccccacgcacgtgggggtgaaccgtagttccctaatcatctctgctgcatccgttcgtcttccccacgcacgtgggggtgaaccggttgacggcacaaacttccgtggcatcgcgacgtcttccccacgcacgtgggggtgaaccgatcaagaaagccgagaaacagcaggagatggcgtcttccccacgcacgtgggggtgaaccggcggactatccggacggtcatgtgcatgccgagtcttccccacgcacgtgggggtgaacaggcgggtggcgttggtttcccgtttgcaagtgtgacgcgggaatgacgcgggcgtcgttggttttgagtatgtaggcggggaatgattccccgccttctttttctcacatagagacacggaggacgaagacgagcgaagtcagaagggcgaagttagaagtacgaagttagaagagcgaaggacgaaattggcttgtccttcgcctttcgcccttcgcacttcgctcttcttccttcgctcttccttcgctcttcctccggcctacagcctcccgcctcccgcctcaaaccctacggattgatggtgacggtcacggtgtcgctgaatgcgccgactcggttgtgtcggtcgacgtatgcggctcggtaggtgatcgtcaggggttcggggttcatggtgacgtgggtgtagggggaccggttgtcgtcatcaaggaagacccattctttttcttcggcgggcggaccgcttccgatgtagtaccagatgcgtacgccgcgtatgcctgcgggcagcgcgttttggcgcgcgttcaacgggtttggcccgaacttgattttagcccgtttgcgctcgccgacatcgatgtcgagcatcgggtggcctgcttcttcgatgctgacttcgctcagcggcgtaggctcgtcatcggcgacggtgatcccgagatcgcgccggatcccgtcggtcattgcgggatgatgctggatccgctggaccaggttgcgcaaccgcggctcgatggtatcggcgcgatcggcatcccgtatcgccacggcggcccgatacgcgttgtgggttgagacgacatcgtcttgctcgaccgagaaccgggtcgcgtcggcctggcaatcactgatctcgcccgaggtgacgtctaccgtcgtcccgtgaacaccgatttgtgtcccaaagttgttcatccaaaacgcgaaatcatcgacacttgttggcaaatatcctgccataccacacactcctttccctttgttgaccttcgtttcgttctacgacttcttcgttgcctgcctttcttctttcatctcctttccttttcgcctccggtctcccgcctacagcctcccgtctacggactaatcgtcacggtcacggtgtcgctgaacgcgccgacgcggttgtgtcggtcgacgtaggcggctctgtaggtaatcgtgaggggttgggcgttcatggtgacgtgggtgtagggggaccggttgtcgtcgtcgaggaagatccagtctttttcttcgggtgggggtccgcttccgatgtagtaccagaggcggacacggcgtatgccggcgggtaacgcgttgtggcgcgcgttcaacgggttcgggccgaacttgattttagcccgtttgcgctcgctgacatcgatgtcgagcatcgggtggccggcttcttcgatggatacggcggtttgcggcgtgggctcgctatcgggcaccgtaatgccgaggtcgcgccggatcccgtcggtcatggcggggtgatgctggatccgctggaccaggttgcgcaaccgcggttcgatggtatccgcgcggtcgttgtcgcggacggccaggccggcacggtacgcattgtgcgccgaggtaacgccatcgatgtcctcggcgaagcggtcgtccaagaaccgcagcatcagcacctcgagcgccgcgatgtcgagttcctcccaatacgctatgagtcgctgggcgaagtggcccagccaacgcgaaaactcatcgtctttcgccggaagataaccacccatgatccgccacccctcctcgtttccatacccgttacgccatagcccatcaacacagcacgtcatcgaagaacacctacatggtaggccaccgcgcacggtatgtcaagcgctcttttgaggctgtaggctgtaggccggaggctggaggcttacctcgttcctgcccccgacctcgttcctgcccccgacctcgttcccaaatttcgcgccctcgttcctgcccccaacctcgttcccaaattgcatttgggaacgcacttgtgctaaagcttcgcttgcgccgccacccgtgactcgtccagcaggggcacgacggcgaatagcgccagagacggtgatcccaacctcgttgcgtgcgaggtcgtgcagtaattcagacggcggtgcagggtccaacccgcgttgccaacggacgccattcccggtggggcaaacaaagtttttggcgcaagtgcgttcccaaatccaatttgggaacgaggtgagatggctcctgcgcgttccacgtcaagcccttccttatcggccagccaatccgcccctttccgcattcgcttcgccatcctacgattactatcaggtcgtcggcattacacggggcgtgcccaagggcggcgcgaccacacgatgctgtccggtcaatgcgcggtagagctcctcaaagccttctgcctgatacatcttgaaatgagtaaacgtctttacaggcgttgggatacaggcactatggtcctcctcgaagagtaccgccctgaatttatcgcttaccgtttgtgcgtcgtacagatgctggtagattaaatgcccttcccaggttgcccccagccctgttcccggcttttcctcttttttgacgcggcacaggtatttcggcgaacataccataagcactgtggatgcctcgcggatgattttgtccatccatgccggccagccttccgctgggcccatttcgcccatatactggtctatccaggcgtccacaccccaggtgcgcagatcatcggccagttgccgcaccttggccgcaaaacccttgtcttcccacgcataactgatgaatactttaccctgtggaaccagcagcggcttctcttccatctttatctcccgttcttttggaatcgtatattcttcaatgccctccagcagttcgcgcacggtatactttctcttagcgccctgggggcgccacgagtacatgcggccctcgtctttctcgtattgttccaggtccttgtagtccaccgtcacgcccggatcgtcgggcaggctcaccatctccctgacttccagatgccgcatggcgccgtggatagccgcaagattatgccgcacgaccgtaagcgccctccggctggcaggttctctcttttcgacggacacgaatacctttttctcttcccggctgccccgaaccaatacgcgccgtccgtcaatccgcatcacgacgccattcttccagtaggtgttcttggagatcgcattgtgcatgcggacgataaatcgcggaatcaatcccgcgggcaggtagtcatagtgatattccagattcagcgagcttcccggctcaataccgtggtccggttcctgcgggggcagcaattcgggaatcaggcgcagccctgccttgttcggcggcgggtcgggaatggggaagcacagttcgaaaaggtccgcctccatcatggccaaaataaacatctggtgctttttcgggtagtccttctgtctatggaagatgcgcttcaggtcagcaagttcaagttggccgtgacgctcccggacaaccaggtcggtcaaaatcgcgtataccccttgcgtcacccatgtcggatcgagcacatacgtgtcgggcagcggaccgtacccgccgggactgtcataatgaagaagtgttccaagttgcttcaggtaggcaagcagcgcatttctgtcgccggccgtgagtttatgcttctcacagagcgtgtcatactcctcacggggaagattcttccgctttccggcctcgtgctccaaggcggtcttggccttcagatagctgccgggtaccttctggcggacattatcaagattccggacgcgctcgataatcgcctggcgaagcacctcaataccttccccgtggcggctcacatccttaccgtcgcaaactgtcttgcagaaggggtccggcaggttctccggataatccttgcgcagccgcgtgtcgtctggttcataactaccctcgtcgcgcttgttgagcaccacgatcaccggggaatccaccccaaacgtgcggatcttttccatccaataccggagtttgctctgttcttcattttcccgcgaatcaatcaccagaagatacaggctccgctccgtcaggaaaaactggtgcgttgcctgcatgatctcctgccccccgaaatcccagatattcacccggatcggctgcccgccctccgaggcgctcgccaccgtccaatccccaatctcaatgcccggggtccattccggatgttccaggcgtttcccctcggtaatccaatgaatcagcgcggtcttgcccacgcccggctcgcccacgaccagtattttcgcctcattcagcgggaacgtgtccggcccggacacaccgggttggctgtcttcctgtagacggaaataaaaatcgagaatcggttgcggcgcggcgggctgcgcgtctttgacgagaacctcctcccaggtgggcccgaggatttccggcggcaggcccaatgccggattggcgtgcagaaaaagtttctccagttttgttaaacgtcgaagcgactcgggcagcgtggaaagctgattgttgtcgaggtacagtcttgtcagcgcggtgagttggcctatctcccgcggcagcatggaaagctgattgttgttgagattcaattccgtcagcgcggtgagttggactatctccggcggcagcgtggaaagctgattgttgttgagccatagttccgtcagcgcggtgagttggcctatctccggcggcagcgtggaaagctgattgttgtcgaggtcgagtcttgtcagcgcggtgagttggcctatctccggcggcagcgtggaaagctgattgttgtcgagtcgcaattccgtcagcgcggtgagttggactatctccggcggca

SEQ ID NO: 1026 - DNA, 103347 bp, Artificial Sequence
  Synthetic Oligonucleotide
  misc_feature (1)..(92024): n is a, c, g, or t
nnnnnnnnnnnnnnnnnnnnnnnnnnnnnnnnnnnnnnnnnnnnnnnnnnnnnnnnnnnnnnnnnnnnnnnnnnnnnnnnnnnnnnnnnnnnnnnnnnnnnnnnnnnnnnnnnnnnnnnnnnnnnnnnnnnnnnnnnnnnnnnnnnnnnnnnnnnnnnnnnnnnnnnnnnnnnnnnnnnnnnnnnnnnnnnnnnnnnnnnnnnnnnnnnnnnnnnnnnnnnnnnnnnnnnnnnnnnnnnnnnnnnnnnnnnnnnnnnnnnnnnnnnnnnnnnnnnnnnnnnnnnnnnnnnnnnnnnnnnnnnnnnnnnnnnnnnnnnnnnnnnnnnnnnnnnnnnnnnnnnnnnnnnnnnnnnnnnnnnnnnnnnnnnnnnnnnnnnnnnnnnnnnnnnnnnnnnnnnnnnnnnnnnnnnnnnnnnnnnnnnnnnnnnnnnnnnnnnnnnnnnnnnnnnnnnnnnnnnnnnnnnnnnnnnnnnnnnnnnnnnnnnnnnnnnnnnnnnnnnnnnnnnnnnnnnnnnnnnnnnnnnnnnnnnnnnnnnnnnnnnnnnnnnnnnnnnnnnnnnnnnnnnnnnnnnnnnnnnnnnnnnnnnnnnnnnnnnnnnnnnnnnnnnnnnnnnnnnnnnnnnnnnnnnnnnnnnnnnnnnnnnnnnnnnnnnnnnnnnnnnnnnnnnnnnnnnnnnnnnnnnnnnnnnnnnnnnnnnnnnnnnnnnnnnnnnnnnnnnnnnnnnnnnnnnnnnnnnnnnnnnnnnnnnnnnnnnnnnnnnnnnnnnnnnnnnnnnnnnnnnnnnnnnnnnnnnnnnnnnnnnnnnnnnnnnnnnnnnnnnnnnnnnnnnnnnnnnnnnnnnnnnnnnnnnnnnnnnnnnnnnnnnnnnnnnnnnnnnnnnnnnnnnnnnnnnnnnnnnnnnnnnnnnnnnnnnnnnnnnnnnnnnnnnnnnnnnnnnnnnnnnnnnnnnnnnnnnnnnnnnnnnnnnnnnnnnnnnnnnnnnnnnnnnnnnnnnnnnnnnnnnnnnnnnnnnnnnnnnnnnnnnnnnnnnnnnnnnnnnnnnnnnnnnnnnnnnnnnnnnnnnnnnnnnnnnnnnnnnnnnnnnnnnnnnnnnnnnnnnnnnnnnnnnnnnnnnnnnnnnnnnnnnnnnnnnnnnnnnnnnnnnnnnnnnnnnnnnnnnnnnnnnnnnnnnnnnnnnnnnnnnnnnnnnnnnnnnnnnnnnnnnnnnnnnnnnnnnnnnnnnnnnnnnnnnnnnnnnnnnnnnnnnnnnnnnnnnnnnnnnnnnnnnnnnnnnnnnnnnnnnnnnnnnnnnnnnnnnnnnnnnnnnnnnnnnnnnnnnnnnnnnnnnnnnnnnnnnnnnnnnnnnnnnnnnnnnnnnnnnnnnnnnnnnnnnnnnnnnnnnnnnnnnnnnnnnnnnnnnnnnnnnnnnnnnnnnnnnnnnnnnnnnnnnnnnnnnnnnnnnnnnnnnnnnnnnnnnnnnnnnnnnnnnnnnnnnnnnnnnnnnnnnnnnnnnnnnnnnnnnnnnnnnnnnnnnnnnnnnnnnnnnnnnnnnnnnnnnnnnnnnnnnnnnnnnnnnnnnnnnnnnnnnnnnnnnnnnnnnnnnnnnnnnnnnnnnnnnnnnnnnnnnnnnnnnnnnnnnnnnnnnnnnnnnnnnnnnnnnnnnnnnnnnnnnnnnnnnnnnnnnnnnnnnnnnnnnnnnnnnnnnnnnnnnnnnnnnnnnnnnnnnnnnnnnnnnnnnnnnnnnnnnnnnnnnnnnnnnnnnnnnnnnnnnnnnnnnnnnnnnnnnnnnnnnnnnnnnnnnnnnnnnnnnnnnnnnnnnnnnnnnnnnnnnnnnnnnnnnnnnnnnnnnnnnnnnnnnnnnnnnnnnnnnnnnnnnnnnnnnnnnnnnnnnnnnnnnnnnnnnnnnnnnnnnnnnnnnnnnnnnnnnnnnnnnnnnnnnnnnnnnnnnnnnnnnnnnnnnnnnnnnnnnnnnnnnnnnnnnnnnnnnnnnnnnnnnnnnnnnnnnnnnnnnnnnnnnnnnnnnnnnnnnnnnnnnnnnnnnnnnnnnnnnnnnnnnnnnnnnnnnnnnnnnnnnnnnnnnnnnnnnnnnnnnnnnnnnnnnnnnnnnnnnnnnnnnnnnnnnnnnnnnnnnnnnnnnnnnnnnnnnnnnnnnnnnnnnnnnnnnnnnnnnnnnnnnnnnnnnnnnnnnnnnnnnnnnnnnnnnnnnnnnnnnnnnnnnnnnnnnnnnnnnnnnnnnnnnnnnnnnnnnnnnnnnnnnnnnnnnnnnnnnnnnnnnnnnnnnnnnnnnnnnnnnnnnnnnnnnnnnnnnnnnnnnnnnnnnnnnnnnnnnnnnnnnnnnnnnnnnnnnnnnnnnnnnnnnnnnnnnnnnnnnnnnnnnnnnnnnnnnnnnnnnnnnnnnnnnnnnnnnnnnnnnnnnnnnnnnnnnnnnnnnnnnnnnnnnnnnnnnnnnnnnnnnnnnnnnnnnnnnnnnnnnnnnnnnnnnnnnnnnnnnnnnnnnnnnnnnnnnnnnnnnnnnnnnnnnnnnnnnnnnnnnnnnnnnnnnnnnnnnnnnnnnnnnnnnnnnnnnnnnnnnnnnnnnnnnnnnnnnnnnnnnnnnnnnnnnnnnnnnnnnnnnnnnnnnnnnnnnnnnnnnnnnnnnnnnnnnnnnnnnnnnnnnnnnnnnnnnnnnnnnnnnnnnnnnnnnnnnnnnnnnnnnnnnnnnnnnnnnnnnnnnnnnnnnnnnnnnnnnnnnnnnnnnnnnnnnnnnnnnnnnnnnnnnnnnnnnnnnnnnnnnnnnnnnnnnnnnnnnnnnnnnnnnnnnnnnnnnnnnnnnnnnnnnnnnnnnnnnnnnnnnnnnnnnnnnnnnnnnnnnnnnnnnnnnnnnnnnnnnnnnnnnnnnnnnnnnnnnnnnnnnnnnnnnnnnnnnnnnnnnnnnnnnnnnnnnnnnnnnnnnnnnnnnnnnnnnnnnnnnnnnnnnnnnnnnnnnnnnnnnnnnnnnnnnnnnnnnnnnnnnnnnnnnnnnnnnnnnnnnnnnnnnnnnnnnnnnnnnnnnnnnnnnnnnnnnnnnnnnnnnnnnnnnnnnnnnnnnnnnnnnnnnnnnnnnnnnnnnnnnnnnnnnnnnnnnnnnnnnnnnnnnnnnnnnnnnnnnnnnnnnnnnnnnnnnnnnnnnnnnnnnnnnnnnnnnnnnnnnnnnnnnnnnnnnnnnnnnnnnnnnnnnnnnnnnnnnnnnnnnnnnnnnnnnnnnnnnnnnnnnnnnnnnnnnnnnnnnnnnnnnnnnnnnnnnnnnnnnnnnnnnnnnnnnnnnnnnnnnnnnnnnnnnnnnnnnnnnnnnnnnnnnnnnnnnnnnnnnnnnnnnnnnnnnnnnnnnnnnnnnnnnnnnnnnnnnnnnnnnnnnnnnnnnnnnnnnnnnnnnnnnnnnnnnnnnnnnnnnnnnnnnnnnnnnnnnnnnnnnnnnnnnnnnnnnnnnnnnnnnnnnnnnnnnnnnnnnnnnnnnnnnnnnnnnnnnnnnnnnnnnnnnnnnnnnnnnnnnnnnnnnnnnnnnnnnnnnnnnnnnnnnnnnnnnnnnnnnnnnnnnnnnnnnnnnnnnnnnnnnnnnnnnnnnnnnnnnnnnnnnnnnnnnnnnnnnnnnnnnnnnnnnnnnnnnnnnnnnnnnnnnnnnnnnnnnnnnnnnnnnnnnnnnnnnnnnnnnnnnnnnnnnnnnnnnnnnnnnnnnnnnnnnnnnnnnnnnnnnnnnnnnnnnnnnnnnnnnnnnnnnnnnnnnnnnnnnnnnnnnnnnnnnnnnnnnnnnnnnnnnnnnnnnnnnnnnnnnnnnnnnnnnnnnnnnnnnnnnnnnnnnnnnnnnnnnnnnnnnnnnnnnnnnnnnnnnnnnnnnnnnnnnnnnnnnnnnnnnnnnnnnnnnnnnnnnnnnnnnnnnnnnnnnnnnnnnnnnnnnnnnnnnnnnnnnnnnnnnnnnnnnnnnnnnnnnnnnnnnnnnnnnnnnnnnnnnnnnnnnnnnnnnnnnnnnnnnnnnnnnnnnnnnnnnnnnnnnnnnnnnnnnnnnnnnnnnnnnnnnnnnnnnnnnnnnnnnnnnnnnnnnnnnnnnnnnnnnnnnnnnnnnnnnnnnnnnnnnnnnnnnnnnnnnnnnnnnnnnnnnnnnnnnnnnnnnnnnnnnnnnnnnnnnnnnnnnnnnnnnnnnnnnnnnnnnnnnnnnnnnnnnnnnnnnnnnnnnnnnnnnnnnnnnnnnnnnnnnnnnnnnnnnnnnnnnnnnnnnnnnnnnnnnnnnnnnnnnnnnnnnnnnnnnnnnnnnnnnnnnnnnnnnnnnnnnnnnnnnnnnnnnnnnnnnnnnnnnnnnnnnnnnnnnnnnnnnnnnnnnnnnnnnnnnnnnnnnnnnnnnnnnnnnnnnnnnnnnnnnnnnnnnnnnnnnnnnnnnnnnnnnnnnnnnnnnnnnnnnnnnnnnnnnnnnnnnnnnnnnnnnnnnnnnnnnnnnnnnnnnnnnnnnnnnnnnnnnnnnnnnnnnnnnnnnnnnnnnnnnnnnnnnnnnnnnnnnnnnnnnnnnnnnnnnnnnnnnnnnnnnnnnnnnnnnnnnnnnnnnnnnnnnnnnnnnnnnnnnnnnnnnnnnnnnnnnnnnnnnnnnnnnnnnnnnnnnnnnnnnnnnnnnnnnnnnnnnnnnnnnnnnnnnnnnnnnnnnnnnnnnnnnnnnnnnnnnnnnnnnnnnnnnnnnnnnnnnnnnnnnnnnnnnnnnnnnnnnnnnnnnnnnnnnnnnnnnnnnnnnnnnnnnnnnnnnnnnnnnnnnnnnnnnnnnnnnnnnnnnnnnnnnnnnnnnnnnnnnnnnnnnnnnnnnnnnnnnnnnnnnnnnnnnnnnnnnnnnnnnnnnnnnnnnnnnnnnnnnnnnnnnnnnnnnnnnnnnnnnnnnnnnnnnnnnnnnnnnnnnnnnnnnnnnnnnnnnnnnnnnnnnnnnnnnnnnnnnnnnnnnnnnnnnnnnnnnnnnnnnnnnnnnnnnnnnnnnnnnnnnnnnnnnnnnnnnnnnnnnnnnnnnnnnnnnnnnnnnnnnnnnnnnnnnnnnnnnnnnnnnnnnnnnnnnnnnnnnnnnnnnnnnnnnnnnnnnnnnnnnnnnnnnnnnnnnnnnnnnnnnnnnnnnnnnnnnnnnnnnnnnnnnnnnnnnnnnnnnnnnnnnnnnnnnnnnnnnnnnnnnnnnnnnnnnnnnnnnnnnnnnnnnnnnnnnnnnnnnnnnnnnnnnnnnnnnnnnnnnnnnnnnnnnnnnnnnnnnnnnnnnnnnnnnnnnnnnnnnnnnnnnnnnnnnnnnnnnnnnnnnnnnnnnnnnnnnnnnnnnnnnnnnnnnnnnnnnnnnnnnnnnnnnnnnnnnnnnnnnnnnnnnnnnnnnnnnnnnnnnnnnnnnnnnnnnnnnnnnnnnnnnnnnnnnnnnnnnnnnnnnnnnnnnnnnnnnnnnnnnnnnnnnnnnnnnnnnnnnnnnnnnnnnnnnnnnnnnnnnnnnnnnnnnnnnnnnnnnnnnnnnnnnnnnnnnnnnnnnnnnnnnnnnnnnnnnnnnnnnnnnnnnnnnnnnnnnnnnnnnnnnnnnnnnnnnnnnnnnnnnnnnnnnnnnnnnnnnnnnnnnnnnnnnnnnnnnnnnnnnnnnnnnnnnnnnnnnnnnnnnnnnnnnnnnnnnnnnnnnnnnnnnnnnnnnnnnnnnnnnnnnnnnnnnnnnnnnnnnnnnnnnnnnnnnnnnnnnnnnnnnnnnnnnnnnnnnnnnnnnnnnnnnnnnnnnnnnnnnnnnnnnnnnnnnnnnnnnnnnnnnnnnnnnnnnnnnnnnnnnnnnnnnnnnnnnnnnnnnnnnnnnnnnnnnnnnnnnnnnnnnnnnnnnnnnnnnnnnnnnnnnnnnnnnnnnnnnnnnnnnnnnnnnnnnnnnnnnnnnnnnnnnnnnnnnnnnnnnnnnnnnnnnnnnnnnnnnnnnnnnnnnnnnnnnnnnnnnnnnnnnnnnnnnnnnnnnnnnnnnnnnnnnnnnnnnnnnnnnnnnnnnnnnnnnnnnnnnnnnnnnnnnnnnnnnnnnnnnnnnnnnnnnnnnnnnnnnnnnnnnnnnnnnnnnnnnnnnnnnnnnnnnnnnnnnnnnnnnnnnnnnnnnnnnnnnnnnnnnnnnnnnnnnnnnnnnnnnnnnnnnnnnnnnnnnnnnnnnnnnnnnnnnnnnnnnnnnnnnnnnnnnnnnnnnnnnnnnnnnnnnnnnnnnnnnnnnnnnnnnnnnnnnnnnnnnnnnnnnnnnnnnnnnnnnnnnnnnnnnnnnnnnnnnnnnnnnnnnnnnnnnnnnnnnnnnnnnnnnnnnnnnnnnnnnnnnnnnnnnnnnnnnnnnnnnnnnnnnnnnnnnnnnnnnnnnnnnnnnnnnnnnnnnnnnnnnnnnnnnnnnnnnnnnnnnnnnnnnnnnnnnnnnnnnnnnnnnnnnnnnnnnnnnnnnnnnnnnnnnnnnnnnnnnnnnnnnnnnnnnnnnnnnnnnnnnnnnnnnnnnnnnnnnnnnnnnnnnnnnnnnnnnnnnnnnnnnnnnnnnnnnnnnnnnnnnnnnnnnnnnnnnnnnnnnnnnnnnnnnnnnnnnnnnnnnnnnnnnnnnnnnnnnnnnnnnnnnnnnnnnnnnnnnnnnnnnnnnnnnnnnnnnnnnnnnnnnnnnnnnnnnnnnnnnnnnnnnnnnnnnnnnnnnnnnnnnnnnnnnnnnnnnnnnnnnnnnnnnnnnnnnnnnnnnnnnnnnnnnnnnnnnnnnnnnnnnnnnnnnnnnnnnnnnnnnnnnnnnnnnnnnnnnnnnnnnnnnnnnnnnnnnnnnnnnnnnnnnnnnnnnnnnnnnnnnnnnnnnnnnnnnnnnnnnnnnnnnnnnnnnnnnnnnnnnnnnnnnnnnnnnnnnnnnnnnnnnnnnnnnnnnnnnnnnnnnnnnnnnnnnnnnnnnnnnnnnnnnnnnnnnnnnnnnnnnnnnnnnnnnnnnnnnnnnnnnnnnnnnnnnnnnnnnnnnnnnnnnnnnnnnnnnnnnnnnnnnnnnnnnnnnnnnnnnnnnnnnnnnnnnnnnnnnnnnnnnnnnnnnnnnnnnnnnnnnnnnnnnnnnnnnnnnnnnnnnnnnnnnnnnnnnnnnnnnnnnnnnnnnnnnnnnnnnnnnnnnnnnnnnnnnnnnnnnnnnnnnnnnnnnnnnnnnnnnnnnnnnnnnnnnnnnnnnnnnnnnnnnnnnnnnnnnnnnnnnnnnnnnnnnnnnnnnnnnnnnnnnnnnnnnnnnnnnnnnnnnnnnnnnnnnnnnnnnnnnnnnnnnnnnnnnnnnnnnnnnnnnnnnnnnnnnnnnnnnnnnnnnnnnnnnnnnnnnnnnnnnnnnnnnnnnnnnnnnnnnnnnnnnnnnnnnnnnnnnnnnnnnnnnnnnnnnnnnnnnnnnnnnnnnnnnnnnnnnnnnnnnnnnnnnnnnnnnnnnnnnnnnnnnnnnnnnnnnnnnnnnnnnnnnnnnnnnnnnnnnnnnnnnnnnnnnnnnnnnnnnnnnnnnnnnnnnnnnnnnnnnnnnnnnnnnnnnnnnnnnnnnnnnnnnnnnnnnnnnnnnnnnnnnnnnnnnnnnnnnnnnnnnnnnnnnnnnnnnnnnnnnnnnnnnnnnnnnnnnnnnnnnnnnnnnnnnnnnnnnnnnnnnnnnnnnnnnnnnnnnnnnnnnnnnnnnnnnnnnnnnnnnnnnnnnnnnnnnnnnnnnnnnnnnnnnnnnnnnnnnnnnnnnnnnnnnnnnnnnnnnnnnnnnnnnnnnnnnnnnnnnnnnnnnnnnnnnnnnnnnnnnnnnnnnnnnnnnnnnnnnnnnnnnnnnnnnnnnnnnnnnnnnnnnnnnnnnnnnnnnnnnnnnnnnnnnnnnnnnnnnnnnnnnnnnnnnnnnnnnnnnnnnnnnnnnnnnnnnnnnnnnnnnnnnnnnnnnnnnnnnnnnnnnnnnnnnnnnnnnnnnnnnnnnnnnnnnnnnnnnnnnnnnnnnnnnnnnnnnnnnnnnnnnnnnnnnnnnnnnnnnnnnnnnnnnnnnnnnnnnnnnnnnnnnnnnnnnnnnnnnnnnnnnnnnnnnnnnnnnnnnnnnnnnnnnnnnnnnnnnnnnnnnnnnnnnnnnnnnnnnnnnnnnnnnnnnnnnnnnnnnnnnnnnnnnnnnnnnnnnnnnnnnnnnnnnnnnnnnnnnnnnnnnnnnnnnnnnnnnnnnnnnnnnnnnnnnnnnnnnnnnnnnnnnnnnnnnnnnnnnnnnnnnnnnnnnnnnnnnnnnnnnnnnnnnnnnnnnnnnnnnnnnnnnnnnnnnnnnnnnnnnnnnnnnnnnnnnnnnnnnnnnnnnnnnnnnnnnnnnnnnnnnnnnnnnnnnnnnnnnnnnnnnnnnnnnnnnnnnnnnnnnnnnnnnnnnnnnnnnnnnnnnnnnnnnnnnnnnnnnnnnnnnnnnnnnnnnnnnnnnnnnnnnnnnnnnnnnnnnnnnnnnnnnnnnnnnnnnnnnnnnnnnnnnnnnnnnnnnnnnnnnnnnnnnnnnnnnnnnnnnnnnnnnnnnnnnnnnnnnnnnnnnnnnnnnnnnnnnnnnnnnnnnnnnnnnnnnnnnnnnnnnnnnnnnnnnnnnnnnnnnnnnnnnnnnnnnnnnnnnnnnnnnnnnnnnnnnnnnnnnnnnnnnnnnnnnnnnnnnnnnnnnnnnnnnnnnnnnnnnnnnnnnnnnnnnnnnnnnnnnnnnnnnnnnnnnnnnnnnnnnnnnnnnnnnnnnnnnnnnnnnnnnnnnnnnnnnnnnnnnnnnnnnnnnnnnnnnnnnnnnnnnnnnnnnnnnnnnnnnnnnnnnnnnnnnnnnnnnnnnnnnnnnnnnnnnnnnnnnnnnnnnnnnnnnnnnnnnnnnnnnnnnnnnnnnnnnnnnnnnnnnnnnnnnnnnnnnnnnnnnnnnnnnnnnnnnnnnnnnnnnnnnnnnnnnnnnnnnnnnnnnnnnnnnnnnnnnnnnnnnnnnnnnnnnnnnnnnnnnnnnnnnnnnnnnnnnnnnnnnnnnnnnnnnnnnnnnnnnnnnnnnnnnnnnnnnnnnnnnnnnnnnnnnnnnnnnnnnnnnnnnnnnnnnnnnnnnnnnnnnnnnnnnnnnnnnnnnnnnnnnnnnnnnnnnnnnnnnnnnnnnnnnnnnnnnnnnnnnnnnnnnnnnnnnnnnnnnnnnnnnnnnnnnnnnnnnnnnnnnnnnnnnnnnnnnnnnnnnnnnnnnnnnnnnnnnnnnnnnnnnnnnnnnnnnnnnnnnnnnnnnnnnnnnnnnnnnnnnnnnnnnnnnnnnnnnnnnnnnnnnnnnnnnnnnnnnnnnnnnnnnnnnnnnnnnnnnnnnnnnnnnnnnnnnnnnnnnnnnnnnnnnnnnnnnnnnnnnnnnnnnnnnnnnnnnnnnnnnnnnnnnnnnnnnnnnnnnnnnnnnnnnnnnnnnnnnnnnnnnnnnnnnnnnnnnnnnnnnnnnnnnnnnnnnnnnnnnnnnnnnnnnnnnnnnnnnnnnnnnnnnnnnnnnnnnnnnnnnnnnnnnnnnnnnnnnnnnnnnnnnnnnnnnnnnnnnnnnnnnnnnnnnnnnnnnnnnnnnnnnnnnnnnnnnnnnnnnnnnnnnnnnnnnnnnnnnnnnnnnnnnnnnnnnnnnnnnnnnnnnnnnnnnnnnnnnnnnnnnnnnnnnnnnnnnnnnnnnnnnnnnnnnnnnnnnnnnnnnnnnnnnnnnnnnnnnnnnnnnnnnnnnnnnnnnnnnnnnnnnnnnnnnnnnnnnnnnnnnnnnnnnnnnnnnnnnnnnnnnnnnnnnnnnnnnnnnnnnnnnnnnnnnnnnnnnnnnnnnnnnnnnnnnnnnnnnnnnnnnnnnnnnnnnnnnnnnnnnnnnnnnnnnnnnnnnnnnnnnnnnnnnnnnnnnnnnnnnnnnnnnnnnnnnnnnnnnnnnnnnnnnnnnnnnnnnnnnnnnnnnnnnnnnnnnnnnnnnnnnnnnnnnnnnnnnnnnnnnnnnnnnnnnnnnnnnnnnnnnnnnnnnnnnnnnnnnnnnnnnnnnnnnnnnnnnnnnnnnnnnnnnnnnnnnnnnnnnnnnnnnnnnnnnnnnnnnnnnnnnnnnnnnnnnnnnnnnnnnnnnnnnnnnnnnnnnnnnnnnnnnnnnnnnnnnnnnnnnnnnnnnnnnnnnnnnnnnnnnnnnnnnnnnnnnnnnnnnnnnnnnnnnnnnnnnnnnnnnnnnnnnnnnnnnnnnnnnnnnnnnnnnnnnnnnnnnnnnnnnnnnnnnnnnnnnnnnnnnnnnnnnnnnnnnnnnnnnnnnnnnnnnnnnnnnnnnnnnnnnnnnnnnnnnnnnnnnnnnnnnnnnnnnnnnnnnnnnnnnnnnnnnnnnnnnnnnnnnnnnnnnnnnnnnnnnnnnnnnnnnnnnnnnnnnnnnnnnnnnnnnnnnnnnnnnnnnnnnnnnnnnnnnnnnnnnnnnnnnnnnnnnnnnnnnnnnnnnnnnnnnnnnnnnnnnnnnnnnnnnnnnnnnnnnnnnnnnnnnnnnnnnnnnnnnnnnnnnnnnnnnnnnnnnnnnnnnnnnnnnnnnnnnnnnnnnnnnnnnnnnnnnnnnnnnnnnnnnnnnnnnnnnnnnnnnnnnnnnnnnnnnnnnnnnnnnnnnnnnnnnnnnnnnnnnnnnnnnnnnnnnnnnnnnnnnnnnnnnnnnnnnnnnnnnnnnnnnnnnnnnnnnnnnnnnnnnnnnnnnnnnnnnnnnnnnnnnnnnnnnnnnnnnnnnnnnnnnnnnnnnnnnnnnnnnnnnnnnnnnnnnnnnnnnnnnnnnnnnnnnnnnnnnnnnnnnnnnnnnnnnnnnnnnnnnnnnnnnnnnnnnnnnnnnnnnnnnnnnnnnnnnnnnnnnnnnnnnnnnnnnnnnnnnnnnnnnnnnnnnnnnnnnnnnnnnnnnnnnnnnnnnnnnnnnnnnnnnnnnnnnnnnnnnnnnnnnnnnnnnnnnnnnnnnnnnnnnnnnnnnnnnnnnnnnnnnnnnnnnnnnnnnnnnnnnnnnnnnnnnnnnnnnnnnnnnnnnnnnnnnnnnnnnnnnnnnnnnnnnnnnnnnnnnnnnnnnnnnnnnnnnnnnnnnnnnnnnnnnnnnnnnnnnnnnnnnnnnnnnnnnnnnnnnnnnnnnnnnnnnnnnnnnnnnnnnnnnnnnnnnnnnnnnnnnnnnnnnnnnnnnnnnnnnnnnnnnnnnnnnnnnnnnnnnnnnnnnnnnnnnnnnnnnnnnnnnnnnnnnnnnnnnnnnnnnnnnnnnnnnnnnnnnnnnnnnnnnnnnnnnnnnnnnnnnnnnnnnnnnnnnnnnnnnnnnnnnnnnnnnnnnnnnnnnnnnnnnnnnnnnnnnnnnnnnnnnnnnnnnnnnnnnnnnnnnnnnnnnnnnnnnnnnnnnnnnnnnnnnnnnnnnnnnnnnnnnnnnnnnnnnnnnnnnnnnnnnnnnnnnnnnnnnnnnnnnnnnnnnnnnnnnnnnnnnnnnnnnnnnnnnnnnnnnnnnnnnnnnnnnnnnnnnnnnnnnnnnnnnnnnnnnnnnnnnnnnnnnnnnnnnnnnnnnnnnnnnnnnnnnnnnnnnnnnnnnnnnnnnnnnnnnnnnnnnnnnnnnnnnnnnnnnnnnnnnnnnnnnnnnnnnnnnnnnnnnnnnnnnnnnnnnnnnnnnnnnnnnnnnnnnnnnnnnnnnnnnnnnnnnnnnnnnnnnnnnnnnnnnnnnnnnnnnnnnnnnnnnnnnnnnnnnnnnnnnnnnnnnnnnnnnnnnnnnnnnnnnnnnnnnnnnnnnnnnnnnnnnnnnnnnnnnnnnnnnnnnnnnnnnnnnnnnnnnnnnnnnnnnnnnnnnnnnnnnnnnnnnnnnnnnnnnnnnnnnnnnnnnnnnnnnnnnnnnnnnnnnnnnnnnnnnnnnnnnnnnnnnnnnnnnnnnnnnnnnnnnnnnnnnnnnnnnnnnnnnnnnnnnnnnnnnnnnnnnnnnnnnnnnnnnnnnnnnnnnnnnnnnnnnnnnnnnnnnnnnnnnnnnnnnnnnnnnnnnnnnnnnnnnnnnnnnnnnnnnnnnnnnnnnnnnnnnnnnnnnnnnnnnnnnnnnnnnnnnnnnnnnnnnnnnnnnnnnnnnnnnnnnnnnnnnnnnnnnnnnnnnnnnnnnnnnnnnnnnnnnnnnnnnnnnnnnnnnnnnnnnnnnnnnnnnnnnnnnnnnnnnnnnnnnnnnnnnnnnnnnnnnnnnnnnnnnnnnnnnnnnnnnnnnnnnnnnnnnnnnnnnnnnnnnnnnnnnnnnnnnnnnnnnnnnnnnnnnnnnnnnnnnnnnnnnnnnnnnnnnnnnnnnnnnnnnnnnnnnnnnnnnnnnnnnnnnnnnnnnnnnnnnnnnnnnnnnnnnnnnnnnnnnnnnnnnnnnnnnnnnnnnnnnnnnnnnnnnnnnnnnnnnnnnnnnnnnnnnnnnnnnnnnnnnnnnnnnnnnnnnnnnnnnnnnnnnnnnnnnnnnnnnnnnnnnnnnnnnnnnnnnnnnnnnnnnnnnnnnnnnnnnnnnnnnnnnnnnnnnnnnnnnnnnnnnnnnnnnnnnnnnnnnnnnnnnnnnnnnnnnnnnnnnnnnnnnnnnnnnnnnnnnnnnnnnnnnnnnnnnnnnnnnnnnnnnnnnnnnnnnnnnnnnnnnnnnnnnnnnnnnnnnnnnnnnnnnnnnnnnnnnnnnnnnnnnnnnnnnnnnnnnnnnnnnnnnnnnnnnnnnnnnnnnnnnnnnnnnnnnnnnnnnnnnnnnnnnnnnnnnnnnnnnnnnnnnnnnnnnnnnnnnnnnnnnnnnnnnnnnnnnnnnnnnnnnnnnnnnnnnnnnnnnnnnnnnnnnnnnnnnnnnnnnnnnnnnnnnnnnnnnnnnnnnnnnnnnnnnnnnnnnnnnnnnnnnnnnnnnnnnnnnnnnnnnnnnnnnnnnnnnnnnnnnnnnnnnnnnnnnnnnnnnnnnnnnnnnnnnnnnnnnnnnnnnnnnnnnnnnnnnnnnnnnnnnnnnnnnnnnnnnnnnnnnnnnnnnnnnnnnnnnnnnnnnnnnnnnnnnnnnnnnnnnnnnnnnnnnnnnnnnnnnnnnnnnnnnnnnnnnnnnnnnnnnnnnnnnnnnnnnnnnnnnnnnnnnnnnnnnnnnnnnnnnnnnnnnnnnnnnnnnnnnnnnnnnnnnnnnnnnnnnnnnnnnnnnnnnnnnnnnnnnnnnnnnnnnnnnnnnnnnnnnnnnnnnnnnnnnnnnnnnnnnnnnnnnnnnnnnnnnnnnnnnnnnnnnnnnnnnnnnnnnnnnnnnnnnnnnnnnnnnnnnnnnnnnnnnnnnnnnnnnnnnnnnnnnnnnnnnnnnnnnnnnnnnnnnnnnnnnnnnnnnnnnnnnnnnnnnnnnnnnnnnnnnnnnnnnnnnnnnnnnnnnnnnnnnnnnnnnnnnnnnnnnnnnnnnnnnnnnnnnnnnnnnnnnnnnnnnnnnnnnnnnnnnnnnnnnnnnnnnnnnnnnnnnnnnnnnnnnnnnnnnnnnnnnnnnnnnnnnnnnnnnnnnnnnnnnnnnnnnnnnnnnnnnnnnnnnnnnnnnnnnnnnnnnnnnnnnnnnnnnnnnnnnnnnnnnnnnnnnnnnnnnnnnnnnnnnnnnnnnnnnnnnnnnnnnnnnnnnnnnnnnnnnnnnnnnnnnnnnnnnnnnnnnnnnnnnnnnnnnnnnnnnnnnnnnnnnnnnnnnnnnnnnnnnnnnnnnnnnnnnnnnnnnnnnnnnnnnnnnnnnnnnnnnnnnnnnnnnnnnnnnnnnnnnnnnnnnnnnnnnnnnnnnnnnnnnnnnnnnnnnnnnnnnnnnnnnnnnnnnnnnnnnnnnnnnnnnnnnnnnnnnnnnnnnnnnnnnnnnnnnnnnnnnnnnnnnnnnnnnnnnnnnnnnnnnnnnnnnnnnnnnnnnnnnnnnnnnnnnnnnnnnnnnnnnnnnnnnnnnnnnnnnnnnnnnnnnnnnnnnnnnnnnnnnnnnnnnnnnnnnnnnnnnnnnnnnnnnnnnnnnnnnnnnnnnnnnnnnnnnnnnnnnnnnnnnnnnnnnnnnnnnnnnnnnnnnnnnnnnnnnnnnnnnnnnnnnnnnnnnnnnnnnnnnnnnnnnnnnnnnnnnnnnnnnnnnnnnnnnnnnnnnnnnnnnnnnnnnnnnnnnnnnnnnnnnnnnnnnnnnnnnnnnnnnnnnnnnnnnnnnnnnnnnnnnnnnnnnnnnnnnnnnnnnnnnnnnnnnnnnnnnnnnnnnnnnnnnnnnnnnnnnnnnnnnnnnnnnnnnnnnnnnnnnnnnnnnnnnnnnnnnnnnnnnnnnnnnnnnnnnnnnnnnnnnnnnnnnnnnnnnnnnnnnnnnnnnnnnnnnnnnnnnnnnnnnnnnnnnnnnnnnnnnnnnnnnnnnnnnnnnnnnnnnnnnnnnnnnnnnnnnnnnnnnnnnnnnnnnnnnnnnnnnnnnnnnnnnnnnnnnnnnnnnnnnnnnnnnnnnnnnnnnnnnnnnnnnnnnnnnnnnnnnnnnnnnnnnnnnnnnnnnnnnnnnnnnnnnnnnnnnnnnnnnnnnnnnnnnnnnnnnnnnnnnnnnnnnnnnnnnnnnnnnnnnnnnnnnnnnnnnnnnnnnnnnnnnnnnnnnnnnnnnnnnnnnnnnnnnnnnnnnnnnnnnnnnnnnnnnnnnnnnnnnnnnnnnnnnnnnnnnnnnnnnnnnnnnnnnnnnnnnnnnnnnnnnnnnnnnnnnnnnnnnnnnnnnnnnnnnnnnnnnnnnnnnnnnnnnnnnnnnnnnnnnnnnnnnnnnnnnnnnnnnnnnnnnnnnnnnnnnnnnnnnnnnnnnnnnnnnnnnnnnnnnnnnnnnnnnnnnnnnnnnnnnnnnnnnnnnnnnnnnnnnnnnnnnnnnnnnnnnnnnnnnnnnnnnnnnnnnnnnnnnnnnnnnnnnnnnnnnnnnnnnnnnnnnnnnnnnnnnnnnnnnnnnnnnnnnnnnnnnnnnnnnnnnnnnnnnnnnnnnnnnnnnnnnnnnnnnnnnnnnnnnnnnnnnnnnnnnnnnnnnnnnnnnnnnnnnnnnnnnnnnnnnnnnnnnnnnnnnnnnnnnnnnnnnnnnnnnnnnnnnnnnnnnnnnnnnnnnnnnnnnnnnnnnnnnnnnnnnnnnnnnnnnnnnnnnnnnnnnnnnnnnnnnnnnnnnnnnnnnnnnnnnnnnnnnnnnnnnnnnnnnnnnnnnnnnnnnnnnnnnnnnnnnnnnnnnnnnnnnnnnnnnnnnnnnnnnnnnnnnnnnnnnnnnnnnnnnnnnnnnnnnnnnnnnnnnnnnnnnnnnnnnnnnnnnnnnnnnnnnnnnnnnnnnnnnnnnnnnnnnnnnnnnnnnnnnnnnnnnnnnnnnnnnnnnnnnnnnnnnnnnnnnnnnnnnnnnnnnnnnnnnnnnnnnnnnnnnnnnnnnnnnnnnnnnnnnnnnnnnnnnnnnnnnnnnnnnnnnnnnnnnnnnnnnnnnnnnnnnnnnnnnnnnnnnnnnnnnnnnnnnnnnnnnnnnnnnnnnnnnnnnnnnnnnnnnnnnnnnnnnnnnnnnnnnnnnnnnnnnnnnnnnnnnnnnnnnnnnnnnnnnnnnnnnnnnnnnnnnnnnnnnnnnnnnnnnnnnnnnnnnnnnnnnnnnnnnnnnnnnnnnnnnnnnnnnnnnnnnnnnnnnnnnnnnnnnnnnnnnnnnnnnnnnnnnnnnnnnnnnnnnnnnnnnnnnnnnnnnnnnnnnnnnnnnnnnnnnnnnnnnnnnnnnnnnnnnnnnnnnnnnnnnnnnnnnnnnnnnnnnnnnnnnnnnnnnnnnnnnnnnnnnnnnnnnnnnnnnnnnnnnnnnnnnnnnnnnnnnnnnnnnnnnnnnnnnnnnnnnnnnnnnnnnnnnnnnnnnnnnnnnnnnnnnnnnnnnnnnnnnnnnnnnnnnnnnnnnnnnnnnnnnnnnnnnnnnnnnnnnnnnnnnnnnnnnnnnnnnnnnnnnnnnnnnnnnnnnnnnnnnnnnnnnnnnnnnnnnnnnnnnnnnnnnnnnnnnnnnnnnnnnnnnnnnnnnnnnnnnnnnnnnnnnnnnnnnnnnnnnnnnnnnnnnnnnnnnnnnnnnnnnnnnnnnnnnnnnnnnnnnnnnnnnnnnnnnnnnnnnnnnnnnnnnnnnnnnnnnnnnnnnnnnnnnnnnnnnnnnnnnnnnnnnnnnnnnnnnnnnnnnnnnnnnnnnnnnnnnnnnnnnnnnnnnnnnnnnnnnnnnnnnnnnnnnnnnnnnnnnnnnnnnnnnnnnnnnnnnnnnnnnnnnnnnnnnnnnnnnnnnnnnnnnnnnnnnnnnnnnnnnnnnnnnnnnnnnnnnnnnnnnnnnnnnnnnnnnnnnnnnnnnnnnnnnnnnnnnnnnnnnnnnnnnnnnnnnnnnnnnnnnnnnnnnnnnnnnnnnnnnnnnnnnnnnnnnnnnnnnnnnnnnnnnnnnnnnnnnnnnnnnnnnnnnnnnnnnnnnnnnnnnnnnnnnnnnnnnnnnnnnnnnnnnnnnnnnnnnnnnnnnnnnnnnnnnnnnnnnnnnnnnnnnnnnnnnnnnnnnnnnnnnnnnnnnnnnnnnnnnnnnnnnnnnnnnnnnnnnnnnnnnnnnnnnnnnnnnnnnnnnnnnnnnnnnnnnnnnnnnnnnnnnnnnnnnnnnnnnnnnnnnnnnnnnnnnnnnnnnnnnnnnnnnnnnnnnnnnnnnnnnnnnnnnnnnnnnnnnnnnnnnnnnnnnnnnnnnnnnnnnnnnnnnnnnnnnnnnnnnnnnnnnnnnnnnnnnnnnnnnnnnnnnnnnnnnnnnnnnnnnnnnnnnnnnnnnnnnnnnnnnnnnnnnnnnnnnnnnnnnnnnnnnnnnnnnnnnnnnnnnnnnnnnnnnnnnnnnnnnnnnnnnnnnnnnnnnnnnnnnnnnnnnnnnnnnnnnnnnnnnnnnnnnnnnnnnnnnnnnnnnnnnnnnnnnnnnnnnnnnnnnnnnnnnnnnnnnnnnnnnnnnnnnnnnnnnnnnnnnnnnnnnnnnnnnnnnnnnnnnnnnnnnnnnnnnnnnnnnnnnnnnnnnnnnnnnnnnnnnnnnnnnnnnnnnnnnnnnnnnnnnnnnnnnnnnnnnnnnnnnnnnnnnnnnnnnnnnnnnnnnnnnnnnnnnnnnnnnnnnnnnnnnnnnnnnnnnnnnnnnnnnnnnnnnnnnnnnnnnnnnnnnnnnnnnnnnnnnnnnnnnnnnnnnnnnnnnnnnnnnnnnnnnnnnnnnnnnnnnnnnnnnnnnnnnnnnnnnnnnnnnnnnnnnnnnnnnnnnnnnnnnnnnnnnnnnnnnnnnnnnnnnnnnnnnnnnnnnnnnnnnnnnnnnnnnnnnnnnnnnnnnnnnnnnnnnnnnnnnnnnnnnnnnnnnnnnnnnnnnnnnnnnnnnnnnnnnnnnnnnnnnnnnnnnnnnnnnnnnnnnnnnnnnnnnnnnnnnnnnnnnnnnnnnnnnnnnnnnnnnnnnnnnnnnnnnnnnnnnnnnnnnnnnnnnnnnnnnnnnnnnnnnnnnnnnnnnnnnnnnnnnnnnnnnnnnnnnnnnnnnnnnnnnnnnnnnnnnnnnnnnnnnnnnnnnnnnnnnnnnnnnnnnnnnnnnnnnnnnnnnnnnnnnnnnnnnnnnnnnnnnnnnnnnnnnnnnnnnnnnnnnnnnnnnnnnnnnnnnnnnnnnnnnnnnnnnnnnnnnnnnnnnnnnnnnnnnnnnnnnnnnnnnnnnnnnnnnnnnnnnnnnnnnnnnnnnnnnnnnnnnnnnnnnnnnnnnnnnnnnnnnnnnnnnnnnnnnnnnnnnnnnnnnnnnnnnnnnnnnnnnnnnnnnnnnnnnnnnnnnnnnnnnnnnnnnnnnnnnnnnnnnnnnnnnnnnnnnnnnnnnnnnnnnnnnnnnnnnnnnnnnnnnnnnnnnnnnnnnnnnnnnnnnnnnnnnnnnnnnnnnnnnnnnnnnnnnnnnnnnnnnnnnnnnnnnnnnnnnnnnnnnnnnnnnnnnnnnnnnnnnnnnnnnnnnnnnnnnnnnnnnnnnnnnnnnnnnnnnnnnnnnnnnnnnnnnnnnnnnnnnnnnnnnnnnnnnnnnnnnnnnnnnnnnnnnnnnnnnnnnnnnnnnnnnnnnnnnnnnnnnnnnnnnnnnnnnnnnnnnnnnnnnnnnnnnnnnnnnnnnnnnnnnnnnnnnnnnnnnnnnnnnnnnnnnnnnnnnnnnnnnnnnnnnnnnnnnnnnnnnnnnnnnnnnnnnnnnnnnnnnnnnnnnnnnnnnnnnnnnnnnnnnnnnnnnnnnnnnnnnnnnnnnnnnnnnnnnnnnnnnnnnnnnnnnnnnnnnnnnnnnnnnnnnnnnnnnnnnnnnnnnnnnnnnnnnnnnnnnnnnnnnnnnnnnnnnnnnnnnnnnnnnnnnnnnnnnnnnnnnnnnnnnnnnnnnnnnnnnnnnnnnnnnnnnnnnnnnnnnnnnnnnnnnnnnnnnnnnnnnnnnnnnnnnnnnnnnnnnnnnnnnnnnnnnnnnnnnnnnnnnnnnnnnnnnnnnnnnnnnnnnnnnnnnnnnnnnnnnnnnnnnnnnnnnnnnnnnnnnnnnnnnnnnnnnnnnnnnnnnnnnnnnnnnnnnnnnnnnnnnnnnnnnnnnnnnnnnnnnnnnnnnnnnnnnnnnnnnnnnnnnnnnnnnnnnnnnnnnnnnnnnnnnnnnnnnnnnnnnnnnnnnnnnnnnnnnnnnnnnnnnnnnnnnnnnnnnnnnnnnnnnnnnnnnnnnnnnnnnnnnnnnnnnnnnnnnnnnnnnnnnnnnnnnnnnnnnnnnnnnnnnnnnnnnnnnnnnnnnnnnnnnnnnnnnnnnnnnnnnnnnnnnnnnnnnnnnnnnnnnnnnnnnnnnnnnnnnnnnnnnnnnnnnnnnnnnnnnnnnnnnnnnnnnnnnnnnnnnnnnnnnnnnnnnnnnnnnnnnnnnnnnnnnnnnnnnnnnnnnnnnnnnnnnnnnnnnnnnnnnnnnnnnnnnnnnnnnnnnnnnnnnnnnnnnnnnnnnnnnnnnnnnnnnnnnnnnnnnnnnnnnnnnnnnnnnnnnnnnnnnnnnnnnnnnnnnnnnnnnnnnnnnnnnnnnnnnnnnnnnnnnnnnnnnnnnnnnnnnnnnnnnnnnnnnnnnnnnnnnnnnnnnnnnnnnnnnnnnnnnnnnnnnnnnnnnnnnnnnnnnnnnnnnnnnnnnnnnnnnnnnnnnnnnnnnnnnnnnnnnnnnnnnnnnnnnnnnnnnnnnnnnnnnnnnnnnnnnnnnnnnnnnnnnnnnnnnnnnnnnnnnnnnnnnnnnnnnnnnnnnnnnnnnnnnnnnnnnnnnnnnnnnnnnnnnnnnnnnnnnnnnnnnnnnnnnnnnnnnnnnnnnnnnnnnnnnnnnnnnnnnnnnnnnnnnnnnnnnnnnnnnnnnnnnnnnnnnnnnnnnnnnnnnnnnnnnnnnnnnnnnnnnnnnnnnnnnnnnnnnnnnnnnnnnnnnnnnnnnnnnnnnnnnnnnnnnnnnnnnnnnnnnnnnnnnnnnnnnnnnnnnnnnnnnnnnnnnnnnnnnnnnnnnnnnnnnnnnnnnnnnnnnnnnnnnnnnnnnnnnnnnnnnnnnnnnnnnnnnnnnnnnnnnnnnnnnnnnnnnnnnnnnnnnnnnnnnnnnnnnnnnnnnnnnnnnnnnnnnnnnnnnnnnnnnnnnnnnnnnnnnnnnnnnnnnnnnnnnnnnnnnnnnnnnnnnnnnnnnnnnnnnnnnnnnnnnnnnnnnnnnnnnnnnnnnnnnnnnnnnnnnnnnnnnnnnnnnnnnnnnnnnnnnnnnnnnnnnnnnnnnnnnnnnnnnnnnnnnnnnnnnnnnnnnnnnnnnnnnnnnnnnnnnnnnnnnnnnnnnnnnnnnnnnnnnnnnnnnnnnnnnnnnnnnnnnnnnnnnnnnnnnnnnnnnnnnnnnnnnnnnnnnnnnnnnnnnnnnnnnnnnnnnnnnnnnnnnnnnnnnnnnnnnnnnnnnnnnnnnnnnnnnnnnnnnnnnnnnnnnnnnnnnnnnnnnnnnnnnnnnnnnnnnnnnnnnnnnnnnnnnnnnnnnnnnnnnnnnnnnnnnnnnnnnnnnnnnnnnnnnnnnnnnnnnnnnnnnnnnnnnnnnnnnnnnnnnnnnnnnnnnnnnnnnnnnnnnnnnnnnnnnnnnnnnnnnnnnnnnnnnnnnnnnnnnnnnnnnnnnnnnnnnnnnnnnnnnnnnnnnnnnnnnnnnnnnnnnnnnnnnnnnnnnnnnnnnnnnnnnnnnnnnnnnnnnnnnnnnnnnnnnnnnnnnnnnnnnnnnnnnnnnnnnnnnnnnnnnnnnnnnnnnnnnnnnnnnnnnnnnnnnnnnnnnnnnnnnnnnnnnnnnnnnnnnnnnnnnnnnnnnnnnnnnnnnnnnnnnnnnnnnnnnnnnnnnnnnnnnnnnnnnnnnnnnnnnnnnnnnnnnnnnnnnnnnnnnnnnnnnnnnnnnnnnnnnnnnnnnnnnnnnnnnnnnnnnnnnnnnnnnnnnnnnnnnnnnnnnnnnnnnnnnnnnnnnnnnnnnnnnnnnnnnnnnnnnnnnnnnnnnnnnnnnnnnnnnnnnnnnnnnnnnnnnnnnnnnnnnnnnnnnnnnnnnnnnnnnnnnnnnnnnnnnnnnnnnnnnnnnnnnnnnnnnnnnnnnnnnnnnnnnnnnnnnnnnnnnnnnnnnnnnnnnnnnnnnnnnnnnnnnnnnnnnnnnnnnnnnnnnnnnnnnnnnnnnnnnnnnnnnnnnnnnnnnnnnnnnnnnnnnnnnnnnnnnnnnnnnnnnnnnnnnnnnnnnnnnnnnnnnnnnnnnnnnnnnnnnnnnnnnnnnnnnnnnnnnnnnnnnnnnnnnnnnnnnnnnnnnnnnnnnnnnnnnnnnnnnnnnnnnnnnnnnnnnnnnnnnnnnnnnnnnnnnnnnnnnnnnnnnnnnnnnnnnnnnnnnnnnnnnnnnnnnnnnnnnnnnnnnnnnnnnnnnnnnnnnnnnnnnnnnnnnnnnnnnnnnnnnnnnnnnnnnnnnnnnnnnnnnnnnnnnnnnnnnnnnnnnnnnnnnnnnnnnnnnnnnnnnnnnnnnnnnnnnnnnnnnnnnnnnnnnnnnnnnnnnnnnnnnnnnnnnnnnnnnnnnnnnnnnnnnnnnnnnnnnnnnnnnnnnnnnnnnnnnnnnnnnnnnnnnnnnnnnnnnnnnnnnnnnnnnnnnnnnnnnnnnnnnnnnnnnnnnnnnnnnnnnnnnnnnnnnnnnnnnnnnnnnnnnnnnnnnnnnnnnnnnnnnnnnnnnnnnnnnnnnnnnnnnnnnnnnnnnnnnnnnnnnnnnnnnnnnnnnnnnnnnnnnnnnnnnnnnnnnnnnnnnnnnnnnnnnnnnnnnnnnnnnnnnnnnnnnnnnnnnnnnnnnnnnnnnnnnnnnnnnnnnnnnnnnnnnnnnnnnnnnnnnnnnnnnnnnnnnnnnnnnnnnnnnnnnnnnnnnnnnnnnnnnnnnnnnnnnnnnnnnnnnnnnnnnnnnnnnnnnnnnnnnnnnnnnnnnnnnnnnnnnnnnnnnnnnnnnnnnnnnnnnnnnnnnnnnnnnnnnnnnnnnnnnnnnnnnnnnnnnnnnnnnnnnnnnnnnnnnnnnnnnnnnnnnnnnnnnnnnnnnnnnnnnnnnnnnnnnnnnnnnnnnnnnnnnnnnnnnnnnnnnnnnnnnnnnnnnnnnnnnnnnnnnnnnnnnnnnnnnnnnnnnnnnnnnnnnnnnnnnnnnnnnnnnnnnnnnnnnnnnnnnnnnnnnnnnnnnnnnnnnnnnnnnnnnnnnnnnnnnnnnnnnnnnnnnnnnnnnnnnnnnnnnnnnnnnnnnnnnnnnnnnnnnnnnnnnnnnnnnnnnnnnnnnnnnnnnnnnnnnnnnnnnnnnnnnnnnnnnnnnnnnnnnnnnnnnnnnnnnnnnnnnnnnnnnnnnnnnnnnnnnnnnnnnnnnnnnnnnnnnnnnnnnnnnnnnnnnnnnnnnnnnnnnnnnnnnnnnnnnnnnnnnnnnnnnnnnnnnnnnnnnnnnnnnnnnnnnnnnnnnnnnnnnnnnnnnnnnnnnnnnnnnnnnnnnnnnnnnnnnnnnnnnnnnnnnnnnnnnnnnnnnnnnnnnnnnnnnnnnnnnnnnnnnnnnnnnnnnnnnnnnnnnnnnnnnnnnnnnnnnnnnnnnnnnnnnnnnnnnnnnnnnnnnnnnnnnnnnnnnnnnnnnnnnnnnnnnnnnnnnnnnnnnnnnnnnnnnnnnnnnnnnnnnnnnnnnnnnnnnnnnnnnnnnnnnnnnnnnnnnnnnnnnnnnnnnnnnnnnnnnnnnnnnnnnnnnnnnnnnnnnnnnnnnnnnnnnnnnnnnnnnnnnnnnnnnnnnnnnnnnnnnnnnnnnnnnnnnnnnnnnnnnnnnnnnnnnnnnnnnnnnnnnnnnnnnnnnnnnnnnnnnnnnnnnnnnnnnnnnnnnnnnnnnnnnnnnnnnnnnnnnnnnnnnnnnnnnnnnnnnnnnnnnnnnnnnnnnnnnnnnnnnnnnnnnnnnnnnnnnnnnnnnnnnnnnnnnnnnnnnnnnnnnnnnnnnnnnnnnnnnnnnnnnnnnnnnnnnnnnnnnnnnnnnnnnnnnnnnnnnnnnnnnnnnnnnnnnnnnnnnnnnnnnnnnnnnnnnnnnnnnnnnnnnnnnnnnnnnnnnnnnnnnnnnnnnnnnnnnnnnnnnnnnnnnnnnnnnnnnnnnnnnnnnnnnnnnnnnnnnnnnnnnnnnnnnnnnnnnnnnnnnnnnnnnnnnnnnnnnnnnnnnnnnnnnnnnnnnnnnnnnnnnnnnnnnnnnnnnnnnnnnnnnnnnnnnnnnnnnnnnnnnnnnnnnnnnnnnnnnnnnnnnnnnnnnnnnnnnnnnnnnnnnnnnnnnnnnnnnnnnnnnnnnnnnnnnnnnnnnnnnnnnnnnnnnnnnnnnnnnnnnnnnnnnnnnnnnnnnnnnnnnnnnnnnnnnnnnnnnnnnnnnnnnnnnnnnnnnnnnnnnnnnnnnnnnnnnnnnnnnnnnnnnnnnnnnnnnnnnnnnnnnnnnnnnnnnnnnnnnnnnnnnnnnnnnnnnnnnnnnnnnnnnnnnnnnnnnnnnnnnnnnnnnnnnnnnnnnnnnnnnnnnnnnnnnnnnnnnnnnnnnnnnnnnnnnnnnnnnnnnnnnnnnnnnnnnnnnnnnnnnnnnnnnnnnnnnnnnnnnnnnnnnnnnnnnnnnnnnnnnnnnnnnnnnnnnnnnnnnnnnnnnnnnnnnnnnnnnnnnnnnnnnnnnnnnnnnnnnnnnnnnnnnnnnnnnnnnnnnnnnnnnnnnnnnnnnnnnnnnnnnnnnnnnnnnnnnnnnnnnnnnnnnnnnnnnnnnnnnnnnnnnnnnnnnnnnnnnnnnnnnnnnnnnnnnnnnnnnnnnnnnnnnnnnnnnnnnnnnnnnnnnnnnnnnnnnnnnnnnnnnnnnnnnnnnnnnnnnnnnnnnnnnnnnnnnnnnnnnnnnnnnnnnnnnnnnnnnnnnnnnnnnnnnnnnnnnnnnnnnnnnnnnnnnnnnnnnnnnnnnnnnnnnnnnnnnnnnnnnnnnnnnnnnnnnnnnnnnnnnnnnnnnnnnnnnnnnnnnnnnnnnnnnnnnnnnnnnnnnnnnnnnnnnnnnnnnnnnnnnnnnnnnnnnnnnnnnnnnnnnnnnnnnnnnnnnnnnnnnnnnnnnnnnnnnnnnnnnnnnnnnnnnnnnnnnnnnnnnnnnnnnnnnnnnnnnnnnnnnnnnnnnnnnnnnnnnnnnnnnnnnnnnnnnnnnnnnnnnnnnnnnnnnnnnnnnnnnnnnnnnnnnnnnnnnnnnnnnnnnnnnnnnnnnnnnnnnnnnnnnnnnnnnnnnnnnnnnnnnnnnnnnnnnnnnnnnnnnnnnnnnnnnnnnnnnnnnnnnnnnnnnnnnnnnnnnnnnnnnnnnnnnnnnnnnnnnnnnnnnnnnnnnnnnnnnnnnnnnnnnnnnnnnnnnnnnnnnnnnnnnnnnnnnnnnnnnnnnnnnnnnnnnnnnnnnnnnnnnnnnnnnnnnnnnnnnnnnnnnnnnnnnnnnnnnnnnnnnnnnnnnnnnnnnnnnnnnnnnnnnnnnnnnnnnnnnnnnnnnnnnnnnnnnnnnnnnnnnnnnnnnnnnnnnnnnnnnnnnnnnnnnnnnnnnnnnnnnnnnnnnnnnnnnnnnnnnnnnnnnnnnnnnnnnnnnnnnnnnnnnnnnnnnnnnnnnnnnnnnnnnnnnnnnnnnnnnnnnnnnnnnnnnnnnnnnnnnnnnnnnnnnnnnnnnnnnnnnnnnnnnnnnnnnnnnnnnnnnnnnnnnnnnnnnnnnnnnnnnnnnnnnnnnnnnnnnnnnnnnnnnnnnnnnnnnnnnnnnnnnnnnnnnnnnnnnnnnnnnnnnnnnnnnnnnnnnnnnnnnnnnnnnnnnnnnnnnnnnnnnnnnnnnnnnnnnnnnnnnnnnnnnnnnnnnnnnnnnnnnnnnnnnnnnnnnnnnnnnnnnnnnnnnnnnnnnnnnnnnnnnnnnnnnnnnnnnnnnnnnnnnnnnnnnnnnnnnnnnnnnnnnnnnnnnnnnnnnnnnnnnnnnnnnnnnnnnnnnnnnnnnnnnnnnnnnnnnnnnnnnnnnnnnnnnnnnnnnnnnnnnnnnnnnnnnnnnnnnnnnnnnnnnnnnnnnnnnnnnnnnnnnnnnnnnnnnnnnnnnnnnnnnnnnnnnnnnnnnnnnnnnnnnnnnnnnnnnnnnnnnnnnnnnnnnnnnnnnnnnnnnnnnnnnnnnnnnnnnnnnnnnnnnnnnnnnnnnnnnnnnnnnnnnnnnnnnnnnnnnnnnnnnnnnnnnnnnnnnnnnnnnnnnnnnnnnnnnnnnnnnnnnnnnnnnnnnnnnnnnnnnnnnnnnnnnnnnnnnnnnnnnnnnnnnnnnnnnnnnnnnnnnnnnnnnnnnnnnnnnnnnnnnnnnnnnnnnnnnnnnnnnnnnnnnnnnnnnnnnnnnnnnnnnnnnnnnnnnnnnnnnnnnnnnnnnnnnnnnnnnnnnnnnnnnnnnnnnnnnnnnnnnnnnnnnnnnnnnnnnnnnnnnnnnnnnnnnnnnnnnnnnnnnnnnnnnnnnnnnnnnnnnnnnnnnnnnnnnnnnnnnnnnnnnnnnnnnnnnnnnnnnnnnnnnnnnnnnnnnnnnnnnnnnnnnnnnnnnnnnnnnnnnnnnnnnnnnnnnnnnnnnnnnnnnnnnnnnnnnnnnnnnnnnnnnnnnnnnnnnnnnnnnnnnnnnnnnnnnnnnnnnnnnnnnnnnnnnnnnnnnnnnnnnnnnnnnnnnnnnnnnnnnnnnnnnnnnnnnnnnnnnnnnnnnnnnnnnnnnnnnnnnnnnnnnnnnnnnnnnnnnnnnnnnnnnnnnnnnnnnnnnnnnnnnnnnnnnnnnnnnnnnnnnnnnnnnnnnnnnnnnnnnnnnnnnnnnnnnnnnnnnnnnnnnnnnnnnnnnnnnnnnnnnnnnnnnnnnnnnnnnnnnnnnnnnnnnnnnnnnnnnnnnnnnnnnnnnnnnnnnnnnnnnnnnnnnnnnnnnnnnnnnnnnnnnnnnnnnnnnnnnnnnnnnnnnnnnnnnnnnnnnnnnnnnnnnnnnnnnnnnnnnnnnnnnnnnnnnnnnnnnnnnnnnnnnnnnnnnnnnnnnnnnnnnnnnnnnnnnnnnnnnnnnnnnnnnnnnnnnnnnnnnnnnnnnnnnnnnnnnnnnnnnnnnnnnnnnnnnnnnnnnnnnnnnnnnnnnnnnnnnnnnnnnnnnnnnnnnnnnnnnnnnnnnnnnnnnnnnnnnnnnnnnnnnnnnnnnnnnnnnnnnnnnnnnnnnnnnnnnnnnnnnnnnnnnnnnnnnnnnnnnnnnnnnnnnnnnnnnnnnnnnnnnnnnnnnnnnnnnnnnnnnnnnnnnnnnnnnnnnnnnnnnnnnnnnnnnnnnnnnnnnnnnnnnnnnnnnnnnnnnnnnnnnnnnnnnnnnnnnnnnnnnnnnnnnnnnnnnnnnnnnnnnnnnnnnnnnnnnnnnnnnnnnnnnnnnnnnnnnnnnnnnnnnnnnnnnnnnnnnnnnnnnnnnnnnnnnnnnnnnnnnnnnnnnnnnnnnnnnnnnnnnnnnnnnnnnnnnnnnnnnnnnnnnnnnnnnnnnnnnnnnnnnnnnnnnnnnnnnnnnnnnnnnnnnnnnnnnnnnnnnnnnnnnnnnnnnnnnnnnnnnnnnnnnnnnnnnnnnnnnnnnnnnnnnnnnnnnnnnnnnnnnnnnnnnnnnnnnnnnnnnnnnnnnnnnnnnnnnnnnnnnnnnnnnnnnnnnnnnnnnnnnnnnnnnnnnnnnnnnnnnnnnnnnnnnnnnnnnnnnnnnnnnnnnnnnnnnnnnnnnnnnnnnnnnnnnnnnnnnnnnnnnnnnnnnnnnnnnnnnnnnnnnnnnnnnnnnnnnnnnnnnnnnnnnnnnnnnnnnnnnnnnnnnnnnnnnnnnnnnnnnnnnnnnnnnnnnnnnnnnnnnnnnnnnnnnnnnnnnnnnnnnnnnnnnnnnnnnnnnnnnnnnnnnnnnnnnnnnnnnnnnnnnnnnnnnnnnnnnnnnnnnnnnnnnnnnnnnnnnnnnnnnnnnnnnnnnnnnnnnnnnnnnnnnnnnnnnnnnnnnnnnnnnnnnnnnnnnnnnnnnnnnnnnnnnnnnnnnnnnnnnnnnnnnnnnnnnnnnnnnnnnnnnnnnnnnnnnnnnnnnnnnnnnnnnnnnnnnnnnnnnnnnnnnnnnnnnnnnnnnnnnnnnnnnnnnnnnnnnnnnnnnnnnnnnnnnnnnnnnnnnnnnnnnnnnnnnnnnnnnnnnnnnnnnnnnnnnnnnnnnnnnnnnnnnnnnnnnnnnnnnnnnnnnnnnnnnnnnnnnnnnnnnnnnnnnnnnnnnnnnnnnnnnnnnnnnnnnnnnnnnnnnnnnnnnnnnnnnnnnnnnnnnnnnnnnnnnnnnnnnnnnnnnnnnnnnnnnnnnnnnnnnnnnnnnnnnnnnnnnnnnnnnnnnnnnnnnnnnnnnnnnnnnnnnnnnnnnnnnnnnnnnnnnnnnnnnnnnnnnnnnnnnnnnnnnnnnnnnnnnnnnnnnnnnnnnnnnnnnnnnnnnnnnnnnnnnnnnnnnnnnnnnnnnnnnnnnnnnnnnnnnnnnnnnnnnnnnnnnnnnnnnnnnnnnnnnnnnnnnnnnnnnnnnnnnnnnnnnnnnnnnnnnnnnnnnnnnnnnnnnnnnnnnnnnnnnnnnnnnnnnnnnnnnnnnnnnnnnnnnnnnnnnnnnnnnnnnnnnnnnnnnnnnnnnnnnnnnnnnnnnnnnnnnnnnnnnnnnnnnnnnnnnnnnnnnnnnnnnnnnnnnnnnnnnnnnnnnnnnnnnnnnnnnnnnnnnnnnnnnnnnnnnnnnnnnnnnnnnnnnnnnnnnnnnnnnnnnnnnnnnnnnnnnnnnnnnnnnnnnnnnnnnnnnnnnnnnnnnnnnnnnnnnnnnnnnnnnnnnnnnnnnnnnnnnnnnnnnnnnnnnnnnnnnnnnnnnnnnnnnnnnnnnnnnnnnnnnnnnnnnnnnnnnnnnnnnnnnnnnnnnnnnnnnnnnnnnnnnnnnnnnnnnnnnnnnnnnnnnnnnnnnnnnnnnnnnnnnnnnnnnnnnnnnnnnnnnnnnnnnnnnnnnnnnnnnnnnnnnnnnnnnnnnnnnnnnnnnnnnnnnnnnnnnnnnnnnnnnnnnnnnnnnnnnnnnnnnnnnnnnnnnnnnnnnnnnnnnnnnnnnnnnnnnnnnnnnnnnnnnnnnnnnnnnnnnnnnnnnnnnnnnnnnnnnnnnnnnnnnnnnnnnnnnnnnnnnnnnnnnnnnnnnnnnnnnnnnnnnnnnnnnnnnnnnnnnnnnnnnnnnnnnnnnnnnnnnnnnnnnnnnnnnnnnnnnnnnnnnnnnnnnnnnnnnnnnnnnnnnnnnnnnnnnnnnnnnnnnnnnnnnnnnnnnnnnnnnnnnnnnnnnnnnnnnnnnnnnnnnnnnnnnnnnnnnnnnnnnnnnnnnnnnnnnnnnnnnnnnnnnnnnnnnnnnnnnnnnnnnnnnnnnnnnnnnnnnnnnnnnnnnnnnnnnnnnnnnnnnnnnnnnnnnnnnnnnnnnnnnnnnnnnnnnnnnnnnnnnnnnnnnnnnnnnnnnnnnnnnnnnnnnnnnnnnnnnnnnnnnnnnnnnnnnnnnnnnnnnnnnnnnnnnnnnnnnnnnnnnnnnnnnnnnnnnnnnnnnnnnnnnnnnnnnnnnnnnnnnnnnnnnnnnnnnnnnnnnnnnnnnnnnnnnnnnnnnnnnnnnnnnnnnnnnnnnnnnnnnnnnnnnnnnnnnnnnnnnnnnnnnnnnnnnnnnnnnnnnnnnnnnnnnnnnnnnnnnnnnnnnnnnnnnnnnnnnnnnnnnnnnnnnnnnnnnnnnnnnnnnnnnnnnnnnnnnnnnnnnnnnnnnnnnnnnnnnnnnnnnnnnnnnnnnnnnnnnnnnnnnnnnnnnnnnnnnnnnnnnnnnnnnnnnnnnnnnnnnnnnnnnnnnnnnnnnnnnnnnnnnnnnnnnnnnnnnnnnnnnnnnnnnnnnnnnnnnnnnnnnnnnnnnnnnnnnnnnnnnnnnnnnnnnnnnnnnnnnnnnnnnnnnnnnnnnnnnnnnnnnnnnnnnnnnnnnnnnnnnnnnnnnnnnnnnnnnnnnnnnnnnnnnnnnnnnnnnnnnnnnnnnnnnnnnnnnnnnnnnnnnnnnnnnnnnnnnnnnnnnnnnnnnnnnnnnnnnnnnnnnnnnnnnnnnnnnnnnnnnnnnnnnnnnnnnnnnnnnnnnnnnnnnnnnnnnnnnnnnnnnnnnnnnnnnnnnnnnnnnnnnnnnnnnnnnnnnnnnnnnnnnnnnnnnnnnnnnnnnnnnnnnnnnnnnnnnnnnnnnnnnnnnnnnnnnnnnnnnnnnnnnnnnnnnnnnnnnnnnnnnnnnnnnnnnnnnnnnnnnnnnnnnnnnnnnnnnnnnnnnnnnnnnnnnnnnnnnnnnnnnnnnnnnnnnnnnnnnnnnnnnnnnnnnnnnnnnnnnnnnnnnnnnnnnnnnnnnnnnnnnnnnnnnnnnnnnnnnnnnnnnnnnnnnnnnnnnnnnnnnnnnnnnnnnnnnnnnnnnnnnnnnnnnnnnnnnnnnnnnnnnnnnnnnnnnnnnnnnnnnnnnnnnnnnnnnnnnnnnnnnnnnnnnnnnnnnnnnnnnnnnnnnnnnnnnnnnnnnnnnnnnnnnnnnnnnnnnnnnnnnnnnnnnnnnnnnnnnnnnnnnnnnnnnnnnnnnnnnnnnnnnnnnnnnnnnnnnnnnnnnnnnnnnnnnnnnnnnnnnnnnnnnnnnnnnnnnnnnnnnnnnnnnnnnnnnnnnnnnnnnnnnnnnnnnnnnnnnnnnnnnnnnnnnnnnnnnnnnnnnnnnnnnnnnnnnnnnnnnnnnnnnnnnnnnnnnnnnnnnnnnnnnnnnnnnnnnnnnnnnnnnnnnnnnnnnnnnnnnnnnnnnnnnnnnnnnnnnnnnnnnnnnnnnnnnnnnnnnnnnnnnnnnnnnnnnnnnnnnnnnnnnnnnnnnnnnnnnnnnnnnnnnnnnnnnnnnnnnnnnnnnnnnnnnnnnnnnnnnnnnnnnnnnnnnnnnnnnnnnnnnnnnnnnnnnnnnnnnnnnnnnnnnnnnnnnnnnnnnnnnnnnnnnnnnnnnnnnnnnnnnnnnnnnnnnnnnnnnnnnnnnnnnnnnnnnnnnnnnnnnnnnnnnnnnnnnnnnnnnnnnnnnnnnnnnnnnnnnnnnnnnnnnnnnnnnnnnnnnnnnnnnnnnnnnnnnnnnnnnnnnnnnnnnnnnnnnnnnnnnnnnnnnnnnnnnnnnnnnnnnnnnnnnnnnnnnnnnnnnnnnnnnnnnnnnnnnnnnnnnnnnnnnnnnnnnnnnnnnnnnnnnnnnnnnnnnnnnnnnnnnnnnnnnnnnnnnnnnnnnnnnnnnnnnnnnnnnnnnnnnnnnnnnnnnnnnnnnnnnnnnnnnnnnnnnnnnnnnnnnnnnnnnnnnnnnnnnnnnnnnnnnnnnnnnnnnnnnnnnnnnnnnnnnnnnnnnnnnnnnnnnnnnnnnnnnnnnnnnnnnnnnnnnnnnnnnnnnnnnnnnnnnnnnnnnnnnnnnnnnnnnnnnnnnnnnnnnnnnnnnnnnnnnnnnnnnnnnnnnnnnnnnnnnnnnnnnnnnnnnnnnnnnnnnnnnnnnnnnnnnnnnnnnnnnnnnnnnnnnnnnnnnnnnnnnnnnnnnnnnnnnnnnnnnnnnnnnnnnnnnnnnnnnnnnnnnnnnnnnnnnnnnnnnnnnnnnnnnnnnnnnnnnnnnnnnnnnnnnnnnnnnnnnnnnnnnnnnnnnnnnnnnnnnnnnnnnnnnnnnnnnnnnnnnnnnnnnnnnnnnnnnnnnnnnnnnnnnnnnnnnnnnnnnnnnnnnnnnnnnnnnnnnnnnnnnnnnnnnnnnnnnnnnnnnnnnnnnnnnnnnnnnnnnnnnnnnnnnnnnnnnnnnnnnnnnnnnnnnnnnnnnnnnnnnnnnnnnnnnnnnnnnnnnnnnnnnnnnnnnnnnnnnnnnnnnnnnnnnnnnnnnnnnnnnnnnnnnnnnnnnnnnnnnnnnnnnnnnnnnnnnnnnnnnnnnnnnnnnnnnnnnnnnnnnnnnnnnnnnnnnnnnnnnnnnnnnnnnnnnnnnnnnnnnnnnnnnnnnnnnnnnnnnnnnnnnnnnnnnnnnnnnnnnnnnnnnnnnnnnnnnnnnnnnnnnnnnnnnnnnnnnnnnnnnnnnnnnnnnnnnnnnnnnnnnnnnnnnnnnnnnnnnnnnnnnnnnnnnnnnnnnnnnnnnnnnnnnnnnnnnnnnnnnnnnnnnnnnnnnnnnnnnnnnnnnnnnnnnnnnnnnnnnnnnnnnnnnnnnnnnnnnnnnnnnnnnnnnnnnnnnnnnnnnnnnnnnnnnnnnnnnnnnnnnnnnnnnnnnnnnnnnnnnnnnnnnnnnnnnnnnnnnnnnnnnnnnnnnnnnnnnnnnnnnnnnnnnnnnnnnnnnnnnnnnnnnnnnnnnnnnnnnnnnnnnnnnnnnnnnnnnnnnnnnnnnnnnnnnnnnnnnnnnnnnnnnnnnnnnnnnnnnnnnnnnnnnnnnnnnnnnnnnnnnnnnnnnnnnnnnnnnnnnnnnnnnnnnnnnnnnnnnnnnnnnnnnnnnnnnnnnnnnnnnnnnnnnnnnnnnnnnnnnnnnnnnnnnnnnnnnnnnnnnnnnnnnnnnnnnnnnnnnnnnnnnnnnnnnnnnnnnnnnnnnnnnnnnnnnnnnnnnnnnnnnnnnnnnnnnnnnnnnnnnnnnnnnnnnnnnnnnnnnnnnnnnnnnnnnnnnnnnnnnnnnnnnnnnnnnnnnnnnnnnnnnnnnnnnnnnnnnnnnnnnnnnnnnnnnnnnnnnnnnnnnnnnnnnnnnnnnnnnnnnnnnnnnnnnnnnnnnnnnnnnnnnnnnnnnnnnnnnnnnnnnnnnnnnnnnnnnnnnnnnnnnnnnnnnnnnnnnnnnnnnnnnnnnnnnnnnnnnnnnnnnnnnnnnnnnnnnnnnnnnnnnnnnnnnnnnnnnnnnnnnnnnnnnnnnnnnnnnnnnnnnnnnnnnnnnnnnnnnnnnnnnnnnnnnnnnnnnnnnnnnnnnnnnnnnnnnnnnnnnnnnnnnnnnnnnnnnnnnnnnnnnnnnnnnnnnnnnnnnnnnnnnnnnnnnnnnnnnnnnnnnnnnnnnnnnnnnnnnnnnnnnnnnnnnnnnnnnnnnnnnnnnnnnnnnnnnnnnnnnnnnnnnnnnnnnnnnnnnnnnnnnnnnnnnnnnnnnnnnnnnnnnnnnnnnnnnnnnnnnnnnnnnnnnnnnnnnnnnnnnnnnnnnnnnnnnnnnnnnnnnnnnnnnnnnnnnnnnnnnnnnnnnnnnnnnnnnnnnnnnnnnnnnnnnnnnnnnnnnnnnnnnnnnnnnnnnnnnnnnnnnnnnnnnnnnnnnnnnnnnnnnnnnnnnnnnnnnnnnnnnnnnnnnnnnnnnnnnnnnnnnnnnnnnnnnnnnnnnnnnnnnnnnnnnnnnnnnnnnnnnnnnnnnnnnnnnnnnnnnnnnnnnnnnnnnnnnnnnnnnnnnnnnnnnnnnnnnnnnnnnnnnnnnnnnnnnnnnnnnnnnnnnnnnnnnnnnnnnnnnnnnnnnnnnnnnnnnnnnnnnnnnnnnnnnnnnnnnnnnnnnnnnnnnnnnnnnnnnnnnnnnnnnnnnnnnnnnnnnnnnnnnnnnnnnnnnnnnnnnnnnnnnnnnnnnnnnnnnnnnnnnnnnnnnnnnnnnnnnnnnnnnnnnnnnnnnnnnnnnnnnnnnnnnnnnnnnnnnnnnnnnnnnnnnnnnnnnnnnnnnnnnnnnnnnnnnnnnnnnnnnnnnnnnnnnnnnnnnnnnnnnnnnnnnnnnnnnnnnnnnnnnnnnnnnnnnnnnnnnnnnnnnnnnnnnnnnnnnnnnnnnnnnnnnnnnnnnnnnnnnnnnnnnnnnnnnnnnnnnnnnnnnnnnnnnnnnnnnnnnnnnnnnnnnnnnnnnnnnnnnnnnnnnnnnnnnnnnnnnnnnnnnnnnnnnnnnnnnnnnnnnnnnnnnnnnnnnnnnnnnnnnnnnnnnnnnnnnnnnnnnnnnnnnnnnnnnnnnnnnnnnnnnnnnnnnnnnnnnnnnnnnnnnnnnnnnnnnnnnnnnnnnnnnnnnnnnnnnnnnnnnnnnnnnnnnnnnnnnnnnnnnnnnnnnnnnnnnnnnnnnnnnnnnnnnnnnnnnnnnnnnnnnnnnnnnnnnnnnnnnnnnnnnnnnnnnnnnnnnnnnnnnnnnnnnnnnnnnnnnnnnnnnnnnnnnnnnnnnnnnnnnnnnnnnnnnnnnnnnnnnnnnnnnnnnnnnnnnnnnnnnnnnnnnnnnnnnnnnnnnnnnnnnnnnnnnnnnnnnnnnnnnnnnnnnnnnnnnnnnnnnnnnnnnnnnnnnnnnnnnnnnnnnnnnnnnnnnnnnnnnnnnnnnnnnnnnnnnnnnnnnnnnnnnnnnnnnnnnnnnnnnnnnnnnnnnnnnnnnnnnnnnnnnnnnnnnnnnnnnnnnnnnnnnnnnnnnnnnnnnnnnnnnnnnnnnnnnnnnnnnnnnnnnnnnnnnnnnnnnnnnnnnnnnnnnnnnnnnnnnnnnnnnnnnnnnnnnnnnnnnnnnnnnnnnnnnnnnnnnnnnnnnnnnnnnnnnnnnnnnnnnnnnnnnnnnnnnnnnnnnnnnnnnnnnnnnnnnnnnnnnnnnnnnnnnnnnnnnnnnnnnnnnnnnnnnnnnnnnnnnnnnnnnnnnnnnnnnnnnnnnnnnnnnnnnnnnnnnnnnnnnnnnnnnnnnnnnnnnnnnnnnnnnnnnnnnnnnnnnnnnnnnnnnnnnnnnnnnnnnnnnnnnnnnnnnnnnnnnnnnnnnnnnnnnnnnnnnnnnnnnnnnnnnnnnnnnnnnnnnnnnnnnnnnnnnnnnnnnnnnnnnnnnnnnnnnnnnnnnnnnnnnnnnnnnnnnnnnnnnnnnnnnnnnnnnnnnnnnnnnnnnnnnnnnnnnnnnnnnnnnnnnnnnnnnnnnnnnnnnnnnnnnnnnnnnnnnnnnnnnnnnnnnnnnnnnnnnnnnnnnnnnnnnnnnnnnnnnnnnnnnnnnnnnnnnnnnnnnnnnnnnnnnnnnnnnnnnnnnnnnnnnnnnnnnnnnnnnnnnnnnnnnnnnnnnnnnnnnnnnnnnnnnnnnnnnnnnnnnnnnnnnnnnnnnnnnnnnnnnnnnnnnnnnnnnnnnnnnnnnnnnnnnnnnnnnnnnnnnnnnnnnnnnnnnnnnnnnnnnnnnnnnnnnnnnnnnnnnnnnnnnnnnnnnnnnnnnnnnnnnnnnnnnnnnnnnnnnnnnnnnnnnnnnnnnnnnnnnnnnnnnnnnnnnnnnnnnnnnnnnnnnnnnnnnnnnnnnnnnnnnnnnnnnnnnnnnnnnnnnnnnnnnnnnnnnnnnnnnnnnnnnnnnnnnnnnnnnnnnnnnnnnnnnnnnnnnnnnnnnnnnnnnnnnnnnnnnnnnnnnnnnnnnnnnnnnnnnnnnnnnnnnnnnnnnnnnnnnnnnnnnnnnnnnnnnnnnnnnnnnnnnnnnnnnnnnnnnnnnnnnnnnnnnnnnnnnnnnnnnnnnnnnnnnnnnnnnnnnnnnnnnnnnnnnnnnnnnnnnnnnnnnnnnnnnnnnnnnnnnnnnnnnnnnnnnnnnnnnnnnnnnnnnnnnnnnnnnnnnnnnnnnnnnnnnnnnnnnnnnnnnnnnnnnnnnnnnnnnnnnnnnnnnnnnnnnnnnnnnnnnnnnnnnnnnnnnnnnnnnnnnnnnnnnnnnnnnnnnnnnnnnnnnnnnnnnnnnnnnnnnnnnnnnnnnnnnnnnnnnnnnnnnnnnnnnnnnnnnnnnnnnnnnnnnnnnnnnnnnnnnnnnnnnnnnnnnnnnnnnnnnnnnnnnnnnnnnnnnnnnnnnnnnnnnnnnnnnnnnnnnnnnnnnnnnnnnnnnnnnnnnnnnnnnnnnnnnnnnnnnnnnnnnnnnnnnnnnnnnnnnnnnnnnnnnnnnnnnnnnnnnnnnnnnnnnnnnnnnnnnnnnnnnnnnnnnnnnnnnnnnnnnnnnnnnnnnnnnnnnnnnnnnnnnnnnnnnnnnnnnnnnnnnnnnnnnnnnnnnnnnnnnnnnnnnnnnnnnnnnnnnnnnnnnnnnnnnnnnnnnnnnnnnnnnnnnnnnnnnnnnnnnnnnnnnnnnnnnnnnnnnnnnnnnnnnnnnnnnnnnnnnnnnnnnnnnnnnnnnnnnnnnnnnnnnnnnnnnnnnnnnnnnnnnnnnnnnnnnnnnnnnnnnnnnnnnnnnnnnnnnnnnnnnnnnnnnnnnnnnnnnnnnnnnnnnnnnnnnnnnnnnnnnnnnnnnnnnnnnnnnnnnnnnnnnnnnnnnnnnnnnnnnnnnnnnnnnnnnnnnnnnnnnnnnnnnnnnnnnnnnnnnnnnnnnnnnnnnnnnnnnnnnnnnnnnnnnnnnnnnnnnnnnnnnnnnnnnnnnnnnnnnnnnnnnnnnnnnnnnnnnnnnnnnnnnnnnnnnnnnnnnnnnnnnnnnnnnnnnnnnnnnnnnnnnnnnnnnnnnnnnnnnnnnnnnnnnnnnnnnnnnnnnnnnnnnnnnnnnnnnnnnnnnnnnnnnnnnnnnnnnnnnnnnnnnnnnnnnnnnnnnnnnnnnnnnnnnnnnnnnnnnnnnnnnnnnnnnnnnnnnnnnnnnnnnnnnnnnnnnnnnnnnnnnnnnnnnnnnnnnnnnnnnnnnnnnnnnnnnnnnnnnnnnnnnnnnnnnnnnnnnnnnnnnnnnnnnnnnnnnnnnnnnnnnnnnnnnnnnnnnnnnnnnnnnnnnnnnnnnnnnnnnnnnnnnnnnnnnnnnnnnnnnnnnnnnnnnnnnnnnnnnnnnnnnnnnnnnnnnnnnnnnnnnnnnnnnnnnnnnnnnnnnnnnnnnnnnnnnnnnnnnnnnnnnnnnnnnnnnnnnnnnnnnnnnnnnnnnnnnnnnnnnnnnnnnnnnnnnnnnnnnnnnnnnnnnnnnnnnnnnnnnnnnnnnnnnnnnnnnnnnnnnnnnnnnnnnnnnnnnnnnnnnnnnnnnnnnnnnnnnnnnnnnnnnnnnnnnnnnnnnnnnnnnnnnnnnnnnnnnnnnnnnnnnnnnnnnnnnnnnnnnnnnnnnnnnnnnnnnnnnnnnnnnnnnnnnnnnnnnnnnnnnnnnnnnnnnnnnnnnnnnnnnnnnnnnnnnnnnnnnnnnnnnnnnnnnnnnnnnnnnnnnnnnnnnnnnnnnnnnnnnnnnnnnnnnnnnnnnnnnnnnnnnnnnnnnnnnnnnnnnnnnnnnnnnnnnnnnnnnnnnnnnnnnnnnnnnnnnnnnnnnnnnnnnnnnnnnnnnnnnnnnnnnnnnnnnnnnnnnnnnnnnnnnnnnnnnnnnnnnnnnnnnnnnnnnnnnnnnnnnnnnnnnnnnnnnnnnnnnnnnnnnnnnnnnnnnnnnnnnnnnnnnnnnnnnnnnnnnnnnnnnnnnnnnnnnnnnnnnnnnnnnnnnnnnnnnnnnnnnnnnnnnnnnnnnnnnnnnnnnnnnnnnnnnnnnnnnnnnnnnnnnnnnnnnnnnnnnnnnnnnnnnnnnnnnnnnnnnnnnnnnnnnnnnnnnnnnnnnnnnnnnnnnnnnnnnnnnnnnnnnnnnnnnnnnnnnnnnnnnnnnnnnnnnnnnnnnnnnnnnnnnnnnnnnnnnnnnnnnnnnnnnnnnnnnnnnnnnnnnnnnnnnnnnnnnnnnnnnnnnnnnnnnnnnnnnnnnnnnnnnnnnnnnnnnnnnnnnnnnnnnnnnnnnnnnnnnnnnnnnnnnnnnnnnnnnnnnnnnnnnnnnnnnnnnnnnnnnnnnnnnnnnnnnnnnnnnnnnnnnnnnnnnnnnnnnnnnnnnnnnnnnnnnnnnnnnnnnnnnnnnnnnnnnnnnnnnnnnnnnnnnnnnnnnnnnnnnnnnnnnnnnnnnnnnnnnnnnnnnnnnnnnnnnnnnnnnnnnnnnnnnnnnnnnnnnnnnnnnnnnnnnnnnnnnnnnnnnnnnnnnnnnnnnnnnnnnnnnnnnnnnnnnnnnnnnnnnnnnnnnnnnnnnnnnnnnnnnnnnnnnnnnnnnnnnnnnnnnnnnnnnnnnnnnnnnnnnnnnnnnnnnnnnnnnnnnnnnnnnnnnnnnnnnnnnnnnnnnnnnnnnnnnnnnnnnnnnnnnnnnnnnnnnnnnnnnnnnnnnnnnnnnnnnnnnnnnnnnnnnnnnnnnnnnnnnnnnnnnnnnnnnnnnnnnnnnnnnnnnnnnnnnnnnnnnnnnnnnnnnnnnnnnnnnnnnnnnnnnnnnnnnnnnnnnnnnnnnnnnnnnnnnnnnnnnnnnnnnnnnnnnnnnnnnnnnnnnnnnnnnnnnnnnnnnnnnnnnnnnnnnnnnnnnnnnnnnnnnnnnnnnnnnnnnnnnnnnnnnnnnnnnnnnnnnnnnnnnnnnnnnnnnnnnnnnnnnnnnnnnnnnnnnnnnnnnnnnnnnnnnnnnnnnnnnnnnnnnnnnnnnnnnnnnnnnnnnnnnnnnnnnnnnnnnnnnnnnnnnnnnnnnnnnnnnnnnnnnnnnnnnnnnnnnnnnnnnnnnnnnnnnnnnnnnnnnnnnnnnnnnnnnnnnnnnnnnnnnnnnnnnnnnnnnnnnnnnnnnnnnnnnnnnnnnnnnnnnnnnnnnnnnnnnnnnnnnnnnnnnnnnnnnnnnnnnnnnnnnnnnnnnnnnnnnnnnnnnnnnnnnnnnnnnnnnnnnnnnnnnnnnnnnnnnnnnnnnnnnnnnnnnnnnnnnnnnnnnnnnnnnnnnnnnnnnnnnnnnnnnnnnnnnnnnnnnnnnnnnnnnnnnnnnnnnnnnnnnnnnnnnnnnnnnnnnnnnnnnnnnnnnnnnnnnnnnnnnnnnnnnnnnnnnnnnnnnnnnnnnnnnnnnnnnnnnnnnnnnnnnnnnnnnnnnnnnnnnnnnnnnnnnnnnnnnnnnnnnnnnnnnnnnnnnnnnnnnnnnnnnnnnnnnnnnnnnnnnnnnnnnnnnnnnnnnnnnnnnnnnnnnnnnnnnnnnnnnnnnnnnnnnnnnnnnnnnnnnnnnnnnnnnnnnnnnnnnnnnnnnnnnnnnnnnnnnnnnnnnnnnnnnnnnnnnnnnnnnnnnnnnnnnnnnnnnnnnnnnnnnnnnnnnnnnnnnnnnnnnnnnnnnnnnnnnnnnnnnnnnnnnnnnnnnnnnnnnnnnnnnnnnnnnnnnnnnnnnnnnnnnnnnnnnnnnnnnnnnnnnnnnnnnnnnnnnnnnnnnnnnnnnnnnnnnnnnnnnnnnnnnnnnnnnnnnnnnnnnnnnnnnnnnnnnnnnnnnnnnnnnnnnnnnnnnnnnnnnnnnnnnnnnnnnnnnnnnnnnnnnnnnnnnnnnnnnnnnnnnnnnnnnnnnnnnnnnnnnnnnnnnnnnnnnnnnnnnnnnnnnnnnnnnnnnnnnnnnnnnnnnnnnnnnnnnnnnnnnnnnnnnnnnnnnnnnnnnnnnnnnnnnnnnnnnnnnnnnnnnnnnnnnnnnnnnnnnnnnnnnnnnnnnnnnnnnnnnnnnnnnnnnnnnnnnnnnnnnnnnnnnnnnnnnnnnnnnnnnnnnnnnnnnnnnnnnnnnnnnnnnnnnnnnnnnnnnnnnnnnnnnnnnnnnnnnnnnnnnnnnnnnnnnnnnnnnnnnnnnnnnnnnnnnnnnnnnnnnnnnnnnnnnnnnnnnnnnnnnnnnnnnnnnnnnnnnnnnnnnnnnnnnnnnnnnnnnnnnnnnnnnnnnnnnnnnnnnnnnnnnnnnnnnnnnnnnnnnnnnnnnnnnnnnnnnnnnnnnnnnnnnnnnnnnnnnnnnnnnnnnnnnnnnnnnnnnnnnnnnnnnnnnnnnnnnnnnnnnnnnnnnnnnnnnnnnnnnnnnnnnnnnnnnnnnnnnnnnnnnnnnnnnnnnnnnnnnnnnnnnnnnnnnnnnnnnnnnnnnnnnnnnnnnnnnnnnnnnnnnnnnnnnnnnnnnnnnnnnnnnnnnnnnnnnnnnnnnnnnnnnnnnnnnnnnnnnnnnnnnnnnnnnnnnnnnnnnnnnnnnnnnnnnnnnnnnnnnnnnnnnnnnnnnnnnnnnnnnnnnnnnnnnnnnnnnnnnnnnnnnnnnnnnnnnnnnnnnnnnnnnnnnnnnnnnnnnnnnnnnnnnnnnnnnnnnnnnnnnnnnnnnnnnnnnnnnnnnnnnnnnnnnnnnnnnnnnnnnnnnnnnnnnnnnnnnnnnnnnnnnnnnnnnnnnnnnnnnnnnnnnnnnnnnnnnnnnnnnnnnnnnnnnnnnnnnnnnnnnnnnnnnnnnnnnnnnnnnnnnnnnnnnnnnnnnnnnnnnnnnnnnnnnnnnnnnnnnnnnnnnnnnnnnnnnnnnnnnnnnnnnnnnnnnnnnnnnnnnnnnnnnnnnnnnnnnnnnnnnnnnnnnnnnnnnnnnnnnnnnnnnnnnnnnnnnnnnnnnnnnnnnnnnnnnnnnnnnnnnnnnnnnnnnnnnnnnnnnnnnnnnnnnnnnnnnnnnnnnnnnnnnnnnnnnnnnnnnnnnnnnnnnnnnnnnnnnnnnnnnnnnnnnnnnnnnnnnnnnnnnnnnnnnnnnnnnnnnnnnnnnnnnnnnnnnnnnnnnnnnnnnnnnnnnnnnnnnnnnnnnnnnnnnnnnnnnnnnnnnnnnnnnnnnnnnnnnnnnnnnnnnnnnnnnnnnnnnnnnnnnnnnnnnnnnnnnnnnnnnnnnnnnnnnnnnnnnnnnnnnnnnnnnnnnnnnnnnnnnnnnnnnnnnnnnnnnnnnnnnnnnnnnnnnnnnnnnnnnnnnnnnnnnnnnnnnnnnnnnnnnnnnnnnnnnnnnnnnnnnnnnnnnnnnnnnnnnnnnnnnnnnnnnnnnnnnnnnnnnnnnnnnnnnnnnnnnnnnnnnnnnnnnnnnnnnnnnnnnnnnnnnnnnnnnnnnnnnnnnnnnnnnnnnnnnnnnnnnnnnnnnnnnnnnnnnnnnnnnnnnnnnnnnnnnnnnnnnnnnnnnnnnnnnnnnnnnnnnnnnnnnnnnnnnnnnnnnnnnnnnnnnnnnnnnnnnnnnnnnnnnnnnnnnnnnnnnnnnnnnnnnnnnnnnnnnnnnnnnnnnnnnnnnnnnnnnnnnnnnnnnnnnnnnnnnnnnnnnnnnnnnnnnnnnnnnnnnnnnnnnnnnnnnnnnnnnnnnnnnnnnnnnnnnnnnnnnnnnnnnnnnnnnnnnnnnnnnnnnnnnnnnnnnnnnnnnnnnnnnnnnnnnnnnnnnnnnnnnnnnnnnnnnnnnnnnnnnnnnnnnnnnnnnnnnnnnnnnnnnnnnnnnnnnnnnnnnnnnnnnnnnnnnnnnnnnnnnnnnnnnnnnnnnnnnnnnnnnnnnnnnnnnnnnnnnnnnnnnnnnnnnnnnnnnnnnnnnnnnnnnnnnnnnnnnnnnnnnnnnnnnnnnnnnnnnnnnnnnnnnnnnnnnnnnnnnnnnnnnnnnnnnnnnnnnnnnnnnnnnnnnnnnnnnnnnnnnnnnnnnnnnnnnnnnnnnnnnnnnnnnnnnnnnnnnnnnnnnnnnnnnnnnnnnnnnnnnnnnnnnnnnnnnnnnnnnnnnnnnnnnnnnnnnnnnnnnnnnnnnnnnnnnnnnnnnnnnnnnnnnnnnnnnnnnnnnnnnnnnnnnnnnnnnnnnnnnnnnnnnnnnnnnnnnnnnnnnnnnnnnnnnnnnnnnnnnnnnnnnnnnnnnnnnnnnnnnnnnnnnnnnnnnnnnnnnnnnnnnnnnnnnnnnnnnnnnnnnnnnnnnnnnnnnnnnnnnnnnnnnnnnnnnnnnnnnnnnnnnnnnnnnnnnnnnnnnnnnnnnnnnnnnnnnnnnnnnnnnnnnnnnnnnnnnnnnnnnnnnnnnnnnnnnnnnnnnnnnnnnnnnnnnnnnnnnnnnnnnnnnnnnnnnnnnnnnnnnnnnnnnnnnnnnnnnnnnnnnnnnnnnnnnnnnnnnnnnnnnnnnnnnnnnnnnnnnnnnnnnnnnnnnnnnnnnnnnnnnnnnnnnnnnnnnnnnnnnnnnnnnnnnnnnnnnnnnnnnnnnnnnnnnnnnnnnnnnnnnnnnnnnnnnnnnnnnnnnnnnnnnnnnnnnnnnnnnnnnnnnnnnnnnnnnnnnnnnnnnnnnnnnnnnnnnnnnnnnnnnnnnnnnnnnnnnnnnnnnnnnnnnnnnnnnnnnnnnnnnnnnnnnnnnnnnnnnnnnnnnnnnnnnnnnnnnnnnnnnnnnnnnnnnnnnnnnnnnnnnnnnnnnnnnnnnnnnnnnnnnnnnnnnnnnnnnnnnnnnnnnnnnnnnnnnnnnnnnnnnnnnnnnnnnnnnnnnnnnnnnnnnnnnnnnnnnnnnnnnnnnnnnnnnnnnnnnnnnnnnnnnnnnnnnnnnnnnnnnnnnnnnnnnnnnnnnnnnnnnnnnnnnnnnnnnnnnnnnnnnnnnnnnnnnnnnnnnnnnnnnnnnnnnnnnnnnnnnnnnnnnnnnnnnnnnnnnnnnnnnnnnnnnnnnnnnnnnnnnnnnnnnnnnnnnnnnnnnnnnnnnnnnnnnnnnnnnnnnnnnnnnnnnnnnnnnnnnnnnnnnnnnnnnnnnnnnnnnnnnnnnnnnnnnnnnnnnnnnnnnnnnnnnnnnnnnnnnnnnnnnnnnnnnnnnnnnnnnnnnnnnnnnnnnnnnnnnnnnnnnnnnnnnnnnnnnnnnnnnnnnnnnnnnnnnnnnnnnnnnnnnnnnnnnnnnnnnnnnnnnnnnnnnnnnnnnnnnnnnnnnnnnnnnnnnnnnnnnnnnnnnnnnnnnnnnnnnnnnnnnnnnnnnnnnnnnnnnnnnnnnnnnnnnnnnnnnnnnnnnnnnnnnnnnnnnnnnnnnnnnnnnnnnnnnnnnnnnnnnnnnnnnnnnnnnnnnnnnnnnnnnnnnnnnnnnnnnnnnnnnnnnnnnnnnnnnnnnnnnnnnnnnnnnnnnnnnnnnnnnnnnnnnnnnnnnnnnnnnnnnnnnnnnnnnnnnnnnnnnnnnnnnnnnnnnnnnnnnnnnnnnnnnnnnnnnnnnnnnnnnnnnnnnnnnnnnnnnnnnnnnnnnnnnnnnnnnnnnnnnnnnnnnnnnnnnnnnnnnnnnnnnnnnnnnnnnnnnnnnnnnnnnnnnnnnnnnnnnnnnnnnnnnnnnnnnnnnnnnnnnnnnnnnnnnnnnnnnnnnnnnnnnnnnnnnnnnnnnnnnnnnnnnnnnnnnnnnnnnnnnnnnnnnnnnnnnnnnnnnnnnnnnnnnnnnnnnnnnnnnnnnnnnnnnnnnnnnnnnnnnnnnnnnnnnnnnnnnnnnnnnnnnnnnnnnnnnnnnnnnnnnnnnnnnnnnnnnnnnnnnnnnnnnnnnnnnnnnnnnnnnnnnnnnnnnnnnnnnnnnnnnnnnnnnnnnnnnnnnnnnnnnnnnnnnnnnnnnnnnnnnnnnnnnnnnnnnnnnnnnnnnnnnnnnnnnnnnnnnnnnnnnnnnnnnnnnnnnnnnnnnnnnnnnnnnnnnnnnnnnnnnnnnnnnnnnnnnnnnnnnnnnnnnnnnnnnnnnnnnnnnnnnnnnnnnnnnnnnnnnnnnnnnnnnnnnnnnnnnnnnnnnnnnnnnnnnnnnnnnnnnnnnnnnnnnnnnnnnnnnnnnnnnnnnnnnnnnnnnnnnnnnnnnnnnnnnnnnnnnnnnnnnnnnnnnnnnnnnnnnnnnnnnnnnnnnnnnnnnnnnnnnnnnnnnnnnnnnnnnnnnnnnnnnnnnnnnnnnnnnnnnnnnnnnnnnnnnnnnnnnnnnnnnnnnnnnnnnnnnnnnnnnnnnnnnnnnnnnnnnnnnnnnnnnnnnnnnnnnnnnnnnnnnnnnnnnnnnnnnnnnnnnnnnnnnnnnnnnnnnnnnnnnnnnnnnnnnnnnnnnnnnnnnnnnnnnnnnnnnnnnnnnnnnnnnnnnnnnnnnnnnnnnnnnnnnnnnnnnnnnnnnnnnnnnnnnnnnnnnnnnnnnnnnnnnnnnnnnnnnnnnnnnnnnnnnnnnnnnnnnnnnnnnnnnnnnnnnnnnnnnnnnnnnnnnnnnnnnnnnnnnnnnnnnnnnnnnnnnnnnnnnnnnnnnnnnnnnnnnnnnnnnnnnnnnnnnnnnnnnnnnnnnnnnnnnnnnnnnnnnnnnnnnnnnnnnnnnnnnnnnnnnnnnnnnnnnnnnnnnnnnnnnnnnnnnnnnnnnnnnnnnnnnnnnnnnnnnnnnnnnnnnnnnnnnnnnnnnnnnnnnnnnnnnnnnnnnnnnnnnnnnnnnnnnnnnnnnnnnnnnnnnnnnnnnnnnnnnnnnnnnnnnnnnnnnnnnnnnnnnnnnnnnnnnnnnnnnnnnnnnnnnnnnnnnnnnnnnnnnnnnnnnnnnnnnnnnnnnnnnnnnnnnnnnnnnnnnnnnnnnnnnnnnnnnnnnnnnnnnnnnnnnnnnnnnnnnnnnnnnnnnnnnnnnnnnnnnnnnnnnnnnnnnnnnnnnnnnnnnnnnnnnnnnnnnnnnnnnnnnnnnnnnnnnnnnnnnnnnnnnnnnnnnnnnnnnnnnnnnnnnnnnnnnnnnnnnnnnnnnnnnnnnnnnnnnnnnnnnnnnnnnnnnnnnnnnnnnnnnnnnnnnnnnnnnnnnnnnnnnnnnnnnnnnnnnnnnnnnnnnnnnnnnnnnnnnnnnnnnnnnnnnnnnnnnnnnnnnnnnnnnnnnnnnnnnnnnnnnnnnnnnnnnnnnnnnnnnnnnnnnnnnnnnnnnnnnnnnnnnnnnnnnnnnnnnnnnnnnnnnnnnnnnnnnnnnnnnnnnnnnnnnnnnnnnnnnnnnnnnnnnnnnnnnnnnnnnnnnnnnnnnnnnnnnnnnnnnnnnnnnnnnnnnnnnnnnnnnnnnnnnnnnnnnnnnnnnnnnnnnnnnnnnnnnnnnnnnnnnnnnnnnnnnnnnnnnnnnnnnnnnnnnnnnnnnnnnnnnnnnnnnnnnnnnnnnnnnnnnnnnnnnnnnnnnnnnnnnnnnnnnnnnnnnnnnnnnnnnnnnnnnnnnnnnnnnnnnnnnnnnnnnnnnnnnnnnnnnnnnnnnnnnnnnnnnnnnnnnnnnnnnnnnnnnnnnnnnnnnnnnnnnnnnnnnnnnnnnnnnnnnnnnnnnnnnnnnnnnnnnnnnnnnnnnnnnnnnnnnnnnnnnnnnnnnnnnnnnnnnnnnnnnnnnnnnnnnnnnnnnnnnnnnnnnnnnnnnnnnnnnnnnnnnnnnnnnnnnnnnnnnnnnnnnnnnnnnnnnnnnnnnnnnnnnnnnnnnnnnnnnnnnnnnnnnnnnnnnnnnnnnnnnnnnnnnnnnnnnnnnnnnnnnnnnnnnnnnnnnnnnnnnnnnnnnnnnnnnnnnnnnnnnnnnnnnnnnnnnnnnnnnnnnnnnnnnnnnnnnnnnnnnnnnnnnnnnnnnnnnnnnnnnnnnnnnnnnnnnnnnnnnnnnnnnnnnnnnnnnnnnnnnnnnnnnnnnnnnnnnnnnnnnnnnnnnnnnnnnnnnnnnnnnnnnnnnnnnnnnnnnnnnnnnnnnnnnnnnnnnnnnnnnnnnnnnnnnnnnnnnnnnnnnnnnnnnnnnnnnnnnnnnnnnnnnnnnnnnnnnnnnnnnnnnnnnnnnnnnnnnnnnnnnnnnnnnnnnnnnnnnnnnnnnnnnnnnnnnnnnnnnnnnnnnnnnnnnnnnnnnnnnnnnnnnnnnnnnnnnnnnnnnnnnnnnnnnnnnnnnnnnnnnnnnnnnnnnnnnnnnnnnnnnnnnnnnnnnnnnnnnnnnnnnnnnnnnnnnnnnnnnnnnnnnnnnnnnnnnnnnnnnnnnnnnnnnnnnnnnnnnnnnnnnnnnnnnnnnnnnnnnnnnnnnnnnnnnnnnnnnnnnnnnnnnnnnnnnnnnnnnnnnnnnnnnnnnnnnnnnnnnnnnnnnnnnnnnnnnnnnnnnnnnnnnnnnnnnnnnnnnnnnnnnnnnnnnnnnnnnnnnnnnnnnnnnnnnnnnnnnnnnnnnnnnnnnnnnnnnnnnnnnnnnnnnnnnnnnnnnnnnnnnnnnnnnnnnnnnnnnnnnnnnnnnnnnnnnnnnnnnnnnnnnnnnnnnnnnnnnnnnnnnnnnnnnnnnnnnnnnnnnnnnnnnnnnnnnnnnnnnnnnnnnnnnnnnnnnnnnnnnnnnnnnnnnnnnnnnnnnnnnnnnnnnnnnnnnnnnnnnnnnnnnnnnnnnnnnnnnnnnnnnnnnnnnnnnnnnnnnnnnnnnnnnnnnnnnnnnnnnnnnnnnnnnnnnnnnnnnnnnnnnnnnnnnnnnnnnnnnnnnnnnnnnnnnnnnnnnnnnnnnnnnnnnnnnnnnnnnnnnnnnnnnnnnnnnnnnnnnnnnnnnnnnnnnnnnnnnnnnnnnnnnnnnnnnnnnnnnnnnnnnnnnnnnnnnnnnnnnnnnnnnnnnnnnnnnnnnnnnnnnnnnnnnnnnnnnnnnnnnnnnnnnnnnnnnnnnnnnnnnnnnnnnnnnnnnnnnnnnnnnnnnnnnnnnnnnnnnnnnnnnnnnnnnnnnnnnnnnnnnnnnnnnnnnnnnnnnnnnnnnnnnnnnnnnnnnnnnnnnnnnnnnnnnnnnnnnnnnnnnnnnnnnnnnnnnnnnnnnnnnnnnnnnnnnnnnnnnnnnnnnnnnnnnnnnnnnnnnnnnnnnnnnnnnnnnnnnnnnnnnnnnnnnnnnnnnnnnnnnnnnnnnnnnnnnnnnnnnnnnnnnnnnnnnnnnnnnnnnnnnnnnnnnnnnnnnnnnnnnnnnnnnnnnnnnnnnnnnnnnnnnnnnnnnnnnnnnnnnnnnnnnnnnnnnnnnnnnnnnnnnnnnnnnnnnnnnnnnnnnnnnnnnnnnnnnnnnnnnnnnnnnnnnnnnnnnnnnnnnnnnnnnnnnnnnnnnnnnnnnnnnnnnnnnnnnnnnnnnnnnnnnnnnnnnnnnnnnnnnnnnnnnnnnnnnnnnnnnnnnnnnnnnnnnnnnnnnnnnnnnnnnnnnnnnnnnnnnnnnnnnnnnnnnnnnnnnnnnnnnnnnnnnnnnnnnnnnnnnnnnnnnnnnnnnnnnnnnnnnnnnnnnnnnnnnnnnnnnnnnnnnnnnnnnnnnnnnnnnnnnnnnnnnnnnnnnnnnnnnnnnnnnnnnnnnnnnnnnnnnnnnnnnnnnnnnnnnnnnnnnnnnnnnnnnnnnnnnnnnnnnnnnnnnnnnnnnnnnnnnnnnnnnnnnnnnnnnnnnnnnnnnnnnnnnnnnnnnnnnnnnnnnnnnnnnnnnnnnnnnnnnnnnnnnnnnnnnnnnnnnnnnnnnnnnnnnnnnnnnnnnnnnnnnnnnnnnnnnnnnnnnnnnnnnnnnnnnnnnnnnnnnnnnnnnnnnnnnnnnnnnnnnnnnnnnnnnnnnnnnnnnnnnnnnnnnnnnnnnnnnnnnnnnnnnnnnnnnnnnnnnnnnnnnnnnnnnnnnnnnnnnnnnnnnnnnnnnnnnnnnnnnnnnnnnnnnnnnnnnnnnnnnnnnnnnnnnnnnnnnnnnnnnnnnnnnnnnnnnnnnnnnnnnnnnnnnnnnnnnnnnnnnnnnnnnnnnnnnnnnnnnnnnnnnnnnnnnnnnnnnnnnnnnnnnnnnnnnnnnnnnnnnnnnnnnnnnnnnnnnnnnnnnnnnnnnnnnnnnnnnnnnnnnnnnnnnnnnnnnnnnnnnnnnnnnnnnnnnnnnnnnnnnnnnnnnnnnnnnnnnnnnnnnnnnnnnnnnnnnnnnnnnnnnnnnnnnnnnnnnnnnnnnnnnnnnnnnnnnnnnnnnnnnnnnnnnnnnnnnnnnnnnnnnnnnnnnnnnnnnnnnnnnnnnnnnnnnnnnnnnnnnnnnnnnnnnnnnnnnnnnnnnnnnnnnnnnnnnnnnnnnnnnnnnnnnnnnnnnnnnnnnnnnnnnnnnnnnnnnnnnnnnnnnnnnnnnnnnnnnnnnnnnnnnnnnnnnnnnnnnnnnnnnnnnnnnnnnnnnnnnnnnnnnnnnnnnnnnnnnnnnnnnnnnnnnnnnnnnnnnnnnnnnnnnnnnnnnnnnnnnnnnnnnnnnnnnnnnnnnnnnnnnnnnnnnnnnnnnnnnnnnnnnnnnnnnnnnnnnnnnnnnnnnnnnnnnnnnnnnnnnnnnnnnnnnnnnnnnnnnnnnnnnnnnnnnnnnnnnnnnnnnnnnnnnnnnnnnnnnnnnnnnnnnnnnnnnnnnnnnnnnnnnnnnnnnnnnnnnnnnnnnnnnnnnnnnnnnnnnnnnnnnnnnnnnnnnnnnnnnnnnnnnnnnnnnnnnnnnnnnnnnnnnnnnnnnnnnnnnnnnnnnnnnnnnnnnnnnnnnnnnnnnnnnnnnnnnnnnnnnnnnnnnnnnnnnnnnnnnnnnnnnnnnnnnnnnnnnnnnnnnnnnnnnnnnnnnnnnnnnnnnnnnnnnnnnnnnnnnnnnnnnnnnnnnnnnnnnnnnnnnnnnnnnnnnnnnnnnnnnnnnnnnnnnnnnnnnnnnnnnnnnnnnnnnnnnnnnnnnnnnnnnnnnnnnnnnnnnnnnnnnnnnnnnnnnnnnnnnnnnnnnnnnnnnnnnnnnnnnnnnnnnnnnnnnnnnnnnnnnnnnnnnnnnnnnnnnnnnnnnnnnnnnnnnnnnnnnnnnnnnnnnnnnnnnnnnnnnnnnnnnnnnnnnnnnnnnnnnnnnnnnnnnnnnnnnnnnnnnnnnnnnnnnnnnnnnnnnnnnnnnnnnnnnnnnnnnnnnnnnnnnnnnnnnnnnnnnnnnnnnnnnnnnnnnnnnnnnnnnnnnnnnnnnnnnnnnnnnnnnnnnnnnnnnnnnnnnnnnnnnnnnnnnnnnnnnnnnnnnnnnnnnnnnnnnnnnnnnnnnnnnnnnnnnnnnnnnnnnnnnnnnnnnnnnnnnnnnnnnnnnnnnnnnnnnnnnnnnnnnnnnnnnnnnnnnnnnnnnnnnnnnnnnnnnnnnnnnnnnnnnnnnnnnnnnnnnnnnnnnnnnnnnnnnnnnnnnnnnnnnnnnnnnnnnnnnnnnnnnnnnnnnnnnnnnnnnnnnnnnnnnnnnnnnnnnnnnnnnnnnnnnnnnnnnnnnnnnnnnnnnnnnnnnnnnnnnnnnnnnnnnnnnnnnnnnnnnnnnnnnnnnnnnnnnnnnnnnnnnnnnnnnnnnnnnnnnnnnnnnnnnnnnnnnnnnnnnnnnnnnnnnnnnnnnnnnnnnnnnnnnnnnnnnnnnnnnnnnnnnnnnnnnnnnnnnnnnnnnnnnnnnnnnnnnnnnnnnnnnnnnnnnnnnnnnnnnnnnnnnnnnnnnnnnnnnnnnnnnnnnnnnnnnnnnnnnnnnnnnnnnnnnnnnnnnnnnnnnnnnnnnnnnnnnnnnnnnnnnnnnnnnnnnnnnnnnnnnnnnnnnnnnnnnnnnnnnnnnnnnnnnnnnnnnnnnnnnnnnnnnnnnnnnnnnnnnnnnnnnnnnnnnnnnnnnnnnnnnnnnnnnnnnnnnnnnnnnnnnnnnnnnnnnnnnnnnnnnnnnnnnnnnnnnnnnnnnnnnnnnnnnnnnnnnnnnnnnnnnnnnnnnnnnnnnnnnnnnnnnnnnnnnnnnnnnnnnnnnnnnnnnnnnnnnnnnnnnnnnnnnnnnnnnnnnnnnnnnnnnnnnnnnnnnnnnnnnnnnnnnnnnnnnnnnnnnnnnnnnnnnnnnnnnnnnnnnnnnnnnnnnnnnnnnnnnnnnnnnnnnnnnnnnnnnnnnnnnnnnnnnnnnnnnnnnnnnnnnnnnnnnnnnnnnnnnnnnnnnnnnnnnnnnnnnnnnnnnnnnnnnnnnnnnnnnnnnnnnnnnnnnnnnnnnnnnnnnnnnnnnnnnnnnnnnnnnnnnnnnnnnnnnnnnnnnnnnnnnnnnnnnnnnnnnnnnnnnnnnnnnnnnnnnnnnnnnnnnnnnnnnnnnnnnnnnnnnnnnnnnnnnnnnnnnnnnnnnnnnnnnnnnnnnnnnnnnnnnnnnnnnnnnnnnnnnnnnnnnnnnnnnnnnnnnnnnnnnnnnnnnnnnnnnnnnnnnnnnnnnnnnnnnnnnnnnnnnnnnnnnnnnnnnnnnnnnnnnnnnnnnnnnnnnnnnnnnnnnnnnnnnnnnnnnnnnnnnnnnnnnnnnnnnnnnnnnnnnnnnnnnnnnnnnnnnnnnnnnnnnnnnnnnnnnnnnnnnnnnnnnnnnnnnnnnnnnnnnnnnnnnnnnnnnnnnnnnnnnnnnnnnnnnnnnnnnnnnnnnnnnnnnnnnnnnnnnnnnnnnnnnnnnnnnnnnnnnnnnnnnnnnnnnnnnnnnnnnnnnnnnnnnnnnnnnnnnnnnnnnnnnnnnnnnnnnnnnnnnnnnnnnnnnnnnnnnnnnnnnnnnnnnnnnnnnnnnnnnnnnnnnnnnnnnnnnnnnnnnnnnnnnnnnnnnnnnnnnnnnnnnnnnnnnnnnnnnnnnnnnnnnnnnnnnnnnnnnnnnnnnnnnnnnnnnnnnnnnnnnnnnnnnnnnnnnnnnnnnnnnnnnnnnnnnnnnnnnnnnnnnnnnnnnnnnnnnnnnnnnnnnnnnnnnnnnnnnnnnnnnnnnnnnnnnnnnnnnnnnnnnnnnnnnnnnnnnnnnnnnnnnnnnnnnnnnnnnnnnnnnnnnnnnnnnnnnnnnnnnnnnnnnnnnnnnnnnnnnnnnnnnnnnnnnnnnnnnnnnnnnnnnnnnnnnnnnnnnnnnnnnnnnnnnnnnnnnnnnnnnnnnnnnnnnnnnnnnnnnnnnnnnnnnnnnnnnnnnnnnnnnnnnnnnnnnnnnnnnnnnnnnnnnnnnnnnnnnnnnnnnnnnnnnnnnnnnnnnnnnnnnnnnnnnnnnnnnnnnnnnnnnnnnnnnnnnnnnnnnnnnnnnnnnnnnnnnnnnnnnnnnnnnnnnnnnnnnnnnnnnnnnnnnnnnnnnnnnnnnnnnnnnnnnnnnnnnnnnnnnnnnnnnnnnnnnnnnnnnnnnnnnnnnnnnnnnnnnnnnnnnnnnnnnnnnnnnnnnnnnnnnnnnnnnnnnnnnnnnnnnnnnnnnnnnnnnnnnnnnnnnnnnnnnnnnnnnnnnnnnnnnnnnnnnnnnnnnnnnnnnnnnnnnnnnnnnnnnnnnnnnnnnnnnnnnnnnnnnnnnnnnnnnnnnnnnnnnnnnnnnnnnnnnnnnnnnnnnnnnnnnnnnnnnnnnnnnnnnnnnnnnnnnnnnnnnnnnnnnnnnnnnnnnnnnnnnnnnnnnnnnnnnnnnnnnnnnnnnnnnnnnnnnnnnnnnnnnnnnnnnnnnnnnnnnnnnnnnnnnnnnnnnnnnnnnnnnnnnnnnnnnnnnnnnnnnnnnnnnnnnnnnnnnnnnnnnnnnnnnnnnnnnnnnnnnnnnnnnnnnnnnnnnnnnnnnnnnnnnnnnnnnnnnnnnnnnnnnnnnnnnnnnnnnnnnnnnnnnnnnnnnnnnnnnnnnnnnnnnnnnnnnnnnnnnnnnnnnnnnnnnnnnnnnnnnnnnnnnnnnnnnnnnnnnnnnnnnnnnnnnnnnnnnnnnnnnnnnnnnnnnnnnnnnnnnnnnnnnnnnnnnnnnnnnnnnnnnnnnnnnnnnnnnnnnnnnnnnnnnnnnnnnnnnnnnnnnnnnnnnnnnnnnnnnnnnnnnnnnnnnnnnnnnnnnnnnnnnnnnnnnnnnnnnnnnnnnnnnnnnnnnnnnnnnnnnnnnnnnnnnnnnnnnnnnnnnnnnnnnnnnnnnnnnnnnnnnnnnnnnnnnnnnnnnnnnnnnnnnnnnnnnnnnnnnnnnnnnnnnnnnnnnnnnnnnnnnnnnnnnnnnnnnnnnnnnnnnnnnnnnnnnnnnnnnnnnnnnnnnnnnnnnnnnnnnnnnnnnnnnnnnnnnnnnnnnnnnnnnnnnnnnnnnnnnnnnnnnnnnnnnnnnnnnnnnnnnnnnnnnnnnnnnnnnnnnnnnnnnnnnnnnnnnnnnnnnnnnnnnnnnnnnnnnnnnnnnnnnnnnnnnnnnnnnnnnnnnnnnnnnnnnnnnnnnnnnnnnnnnnnnnnnnnnnnnnnnnnnnnnnnnnnnnnnnnnnnnnnnnnnnnnnnnnnnnnnnnnnnnnnnnnnnnnnnnnnnnnnnnnnnnnnnnnnnnnnnnnnnnnnnnnnnnnnnnnnnnnnnnnnnnnnnnnnnnnnnnnnnnnnnnnnnnnnnnnnnnnnnnnnnnnnnnnnnnnnnnnnnnnnnnnnnnnnnnnnnnnnnnnnnnnnnnnnnnnnnnnnnnnnnnnnnnnnnnnnnnnnnnnnnnnnnnnnnnnnnnnnnnnnnnnnnnnnnnnnnnnnnnnnnnnnnnnnnnnnnnnnnnnnnnnnnnnnnnnnnnnnnnnnnnnnnnnnnnnnnnnnnnnnnnnnnnnnnnnnnnnnnnnnnnnnnnnnnnnnnnnnnnnnnnnnnnnnnnnnnnnnnnnnnnnnnnnnnnnnnnnnnnnnnnnnnnnnnnnnnnnnnnnnnnnnnnnnnnnnnnnnnnnnnnnnnnnnnnnnnnnnnnnnnnnnnnnnnnnnnnnnnnnnnnnnnnnnnnnnnnnnnnnnnnnnnnnnnnnnnnnnnnnnnnnnnnnnnnnnnnnnnnnnnnnnnnnnnnnnnnnnnnnnnnnnnnnnnnnnnnnnnnnnnnnnnnnnnnnnnnnnnnnnnnnnnnnnnnnnnnnnnnnnnnnnnnnnnnnnnnnnnnnnnnnnnnnnnnnnnnnnnnnnnnnnnnnnnnnnnnnnnnnnnnnnnnnnnnnnnnnnnnnnnnnnnnnnnnnnnnnnnnnnnnnnnnnnnnnnnnnnnnnnnnnnnnnnnnnnnnnnnnnnnnnnnnnnnnnnnnnnnnnnnnnnnnnnnnnnnnnnnnnnnnnnnnnnnnnnnnnnnnnnnnnnnnnnnnnnnnnnnnnnnnnnnnnnnnnnnnnnnnnnnnnnnnnnnnnnnnnnnnnnnnnnnnnnnnnnnnnnnnnnnnnnnnnnnnnnnnnnnnnnnnnnnnnnnnnnnnnnnnnnnnnnnnnnnnnnnnnnnnnnnnnnnnnnnnnnnnnnnnnnnnnnnnnnnnnnnnnnnnnnnnnnnnnnnnnnnnnnnnnnnnnnnnnnnnnnnnnnnnnnnnnnnnnnnnnnnnnnnnnnnnnnnnnnnnnnnnnnnnnnnnnnnnnnnnnnnnnnnnnnnnnnnnnnnnnnnnnnnnnnnnnnnnnnnnnnnnnnnnnnnnnnnnnnnnnnnnnnnnnnnnnnnnnnnnnnnnnnnnnnnnnnnnnnnnnnnnnnnnnnnnnnnnnnnnnnnnnnnnnnnnnnnnnnnnnnnnnnnnnnnnnnnnnnnnnnnnnnnnnnnnnnnnnnnnnnnnnnnnnnnnnnnnnnnnnnnnnnnnnnnnnnnnnnnnnnnnnnnnnnnnnnnnnnnnnnnnnnnnnnnnnnnnnnnnnnnnnnnnnnnnnnnnnnnnnnnnnnnnnnnnnnnnnnnnnnnnnnnnnnnnnnnnnnnnnnnnnnnnnnnnnnnnnnnnnnnnnnnnnnnnnnnnnnnnnnnnnnnnnnnnnnnnnnnnnnnnnnnnnnnnnnnnnnnnnnnnnnnnnnnnnnnnnnnnnnnnnnnnnnnnnnnnnnnnnnnnnnnnnnnnnnnnnnnnnnnnnnnnnnnnnnnnnnnnnnnnnnnnnnnnnnnnnnnnnnnnnnnnnnnnnnnnnnnnnnnnnnnnnnnnnnnnnnnnnnnnnnnnnnnnnnnnnnnnnnnnnnnnnnnnnnnnnnnnnnnnnnnnnnnnnnnnnnnnnnnnnnnnnnnnnnnnnnnnnnnnnnnnnnnnnnnnnnnnnnnnnnnnnnnnnnnnnnnnnnnnnnnnnnnnnnnnnnnnnnnnnnnnnnnnnnnnnnnnnnnnnnnnnnnnnnnnnnnnnnnnnnnnnnnnnnnnnnnnnnnnnnnnnnnnnnnnnnnnnnnnnnnnnnnnnnnnnnnnnnnnnnnnnnnnnnnnnnnnnnnnnnnnnnnnnnnnnnnnnnnnnnnnnnnnnnnnnnnnnnnnnnnnnnnnnnnnnnnnnnnnnnnnnnnnnnnnnnnnnnnnnnnnnnnnnnnnnnnnnnnnnnnnnnnnnnnnnnnnnnnnnnnnnnnnnnnnnnnnnnnnnnnnnnnnnnnnnnnnnnnnnnnnnnnnnnnnnnnnnnnnnnnnnnnnnnnnnnnnnnnnnnnnnnnnnnnnnnnnnnnnnnnnnnnnnnnnnnnnnnnnnnnnnnnnnnnnnnnnnnnnnnnnnnnnnnnnnnnnnnnnnnnnnnnnnnnnnnnnnnnnnnnnnnnnnnnnnnnnnnnnnnnnnnnnnnnnnnnnnnnnnnnnnnnnnnnnnnnnnnnnnnnnnnnnnnnnnnnnnnnnnnnnnnnnnnnnnnnnnnnnnnnnnnnnnnnnnnnnnnnnnnnnnnnnnnnnnnnnnnnnnnnnnnnnnnnnnnnnnnnnnnnnnnnnnnnnnnnnnnnnnnnnnnnnnnnnnnnnnnnnnnnnnnnnnnnnnnnnnnnnnnnnnnnnnnnnnnnnnnnnnnnnnnnnnnnnnnnnnnnnnnnnnnnnnnnnnnnnnnnnnnnnnnnnnnnnnnnnnnnnnnnnnnnnnnnnnnnnnnnnnnnnnnnnnnnnnnnnnnnnnnnnnnnnnnnnnnnnnnnnnnnnnnnnnnnnnnnnnnnnnnnnnnnnnnnnnnnnnnnnnnnnnnnnnnnnnnnnnnnnnnnnnnnnnnnnnnnnnnnnnnnnnnnnnnnnnnnnnnnnnnnnnnnnnnnnnnnnnnnnnnnnnnnnnnnnnnnnnnnnnnnnnnnnnnnnnnnnnnnnnnnnnnnnnnnnnnnnnnnnnnnnnnnnnnnnnnnnnnnnnnnnnnnnnnnnnnnnnnnnnnnnnnnnnnnnnnnnnnnnnnnnnnnnnnnnnnnnnnnnnnnnnnnnnnnnnnnnnnnnnnnnnnnnnnnnnnnnnnnnnnnnnnnnnnnnnnnnnnnnnnnnnnnnnnnnnnnnnnnnnnnnnnnnnnnnnnnnnnnnnnnnnnnnnnnnnnnnnnnnnnnnnnnnnnnnnnnnnnnnnnnnnnnnnnnnnnnnnnnnnnnnnnnnnnnnnnnnnnnnnnnnnnnnnnnnnnnnnnnnnnnnnnnnnnnnnnnnnnnnnnnnnnnnnnnnnnnnnnnnnnnnnnnnnnnnnnnnnnnnnnnnnnnnnnnnnnnnnnnnnnnnnnnnnnnnnnnnnnnnnnnnnnnnnnnnnnnnnnnnnnnnnnnnnnnnnnnnnnnnnnnnnnnnnnnnnnnnnnnnnnnnnnnnnnnnnnnnnnnnnnnnnnnnnnnnnnnnnnnnnnnnnnnnnnnnnnnnnnnnnnnnnnnnnnnnnnnnnnnnnnnnnnnnnnnnnnnnnnnnnnnnnnnnnnnnnnnnnnnnnnnnnnnnnnnnnnnnnnnnnnnnnnnnnnnnnnnnnnnnnnnnnnnnnnnnnnnnnnnnnnnnnnnnnnnnnnnnnnnnnnnnnnnnnnnnnnnnnnnnnnnnnnnnnnnnnnnnnnnnnnnnnnnnnnnnnnnnnnnnnnnnnnnnnnnnnnnnnnnnnnnnnnnnnnnnnnnnnnnnnnnnnnnnnnnnnnnnnnnnnnnnnnnnnnnnnnnnnnnnnnnnnnnnnnnnnnnnnnnnnnnnnnnnnnnnnnnnnnnnnnnnnnnnnnnnnnnnnnnnnnnnnnnnnnnnnnnnnnnnnnnnnnnnnnnnnnnnnnnnnnnnnnnnnnnnnnnnnnnnnnnnnnnnnnnnnnnnnnnnnnnnnnnnnnnnnnnnnnnnnnnnnnnnnnnnnnnnnnnnnnnnnnnnnnnnnnnnnnnnnnnnnnnnnnnnnnnnnnnnnnnnnnnnnnnnnnnnnnnnnnnnnnnnnnnnnnnnnnnnnnnnnnnnnnnnnnnnnnnnnnnnnnnnnnnnnnnnnnnnnnnnnnnnnnnnnnnnnnnnnnnnnnnnnnnnnnnnnnnnnnnnnnnnnnnnnnnnnnnnnnnnnnnnnnnnnnnnnnnnnnnnnnnnnnnnnnnnnnnnnnnnnnnnnnnnnnnnnnnnnnnnnnnnnnnnnnnnnnnnnnnnnnnnnnnnnnnnnnnnnnnnnnnnnnnnnnnnnnnnnnnnnnnnnnnnnnnnnnnnnnnnnnnnnnnnnnnnnnnnnnnnnnnnnnnnnnnnnnnnnnnnnnnnnnnnnnnnnnnnnnnnnnnnnnnnnnnnnnnnnnnnnnnnnnnnnnnnnnnnnnnnnnnnnnnnnnnnnnnnnnnnnnnnnnnnnnnnnnnnnnnnnnnnnnnnnnnnnnnnnnnnnnnnnnnnnnnnnnnnnnnnnnnnnnnnnnnnnnnnnnnnnnnnnnnnnnnnnnnnnnnnnnnnnnnnnnnnnnnnnnnnnnnnnnnnnnnnnnnnnnnnnnnnnnnnnnnnnnnnnnnnnnnnnnnnnnnnnnnnnnnnnnnnnnnnnnnnnnnnnnnnnnnnnnnnnnnnnnnnnnnnnnnnnnnnnnnnnnnnnnnnnnnnnnnnnnnnnnnnnnnnnnnnnnnnnnnnnnnnnnnnnnnnnnnnnnnnnnnnnnnnnnnnnnnnnnnnnnnnnnnnnnnnnnnnnnnnnnnnnnnnnnnnnnnnnnnnnnnnnnnnnnnnnnnnnnnnnnnnnnnnnnnnnnnnnnnnnnnnnnnnnnnnnnnnnnnnnnnnnnnnnnnnnnnnnnnnnnnnnnnnnnnnnnnnnnnnnnnnnnnnnnnnnnnnnnnnnnnnnnnnnnnnnnnnnnnnnnnnnnnnnnnnnnnnnnnnnnnnnnnnnnnnnnnnnnnnnnnnnnnnnnnnnnnnnnnnnnnnnnnnnnnnnnnnnnnnnnnnnnnnnnnnnnnnnnnnnnnnnnnnnnnnnnnnnnnnnnnnnnnnnnnnnnnnnnnnnnnnnnnnnnnnnnnnnnnnnnnnnnnnnnnnnnnnnnnnnnnnnnnnnnnnnnnnnnnnnnnnnnnnnnnnnnnnnnnnnnnnnnnnnnnnnnnnnnnnnnnnnnnnnnnnnnnnnnnnnnnnnnnnnnnnnnnnnnnnnnnnnnnnnnnnnnnnnnnnnnnnnnnnnnnnnnnnnnnnnnnnnnnnnnnnnnnnnnnnnnnnnnnnnnnnnnnnnnnnnnnnnnnnnnnnnnnnnnnnnnnnnnnnnnnnnnnnnnnnnnnnnnnnnnnnnnnnnnnnnnnnnnnnnnnnnnnnnnnnnnnnnnnnnnnnnnnnnnnnnnnnnnnnnnnnnnnnnnnnnnnnnnnnnnnnnnnnnnnnnnnnnnnnnnnnnnnnnnnnnnnnnnnnnnnnnnnnnnnnnnnnnnnnnnnnnnnnnnnnnnnnnnnnnnnnnnnnnnnnnnnnnnnnnnnnnnnnnnnnnnnnnnnnnnnnnnnnnnnnnnnnnnnnnnnnnnnnnnnnnnnnnnnnnnnnnnnnnnnnnnnnnnnnnnnnnnnnnnnnnnnnnnnnnnnnnnnnnnnnnnnnnnnnnnnnnnnnnnnnnnnnnnnnnnnnnnnnnnnnnnnnnnnnnnnnnnnnnnnnnnnnnnnnnnnnnnnnnnnnnnnnnnnnnnnnnnnnnnnnnnnnnnnnnnnnnnnnnnnnnnnnnnnnnnnnnnnnnnnnnnnnnnnnnnnnnnnnnnnnnnnnnnnnnnnnnnnnnnnnnnnnnnnnnnnnnnnnnnnnnnnnnnnnnnnnnnnnnnnnnnnnnnnnnnnnnnnnnnnnnnnnnnnnnnnnnnnnnnnnnnnnnnnnnnnnnnnnnnnnnnnnnnnnnnnnnnnnnnnnnnnnnnnnnnnnnnnnnnnnnnnnnnnnnnnnnnnnnnnnnnnnnnnnnnnnnnnnnnnnnnnnnnnnnnnnnnnnnnnnnnnnnnnnnnnnnnnnnnnnnnnnnnnnnnnnnnnnnnnnnnnnnnnnnnnnnnnnnnnnnnnnnnnnnnnnnnnnnnnnnnnnnnnnnnnnnnnnnnnnnnnnnnnnnnnnnnnnnnnnnnnnnnnnnnnnnnnnnnnnnnnnnnnnnnnnnnnnnnnnnnnnnnnnnnnnnnnnnnnnnnnnnnnnnnnnnnnnnnnnnnnnnnnnnnnnnnnnnnnnnnnnnnnnnnnnnnnnnnnnnnnnnnnnnnnnnnnnnnnnnnnnnnnnnnnnnnnnnnnnnnnnnnnnnnnnnnnnnnnnnnnnnnnnnnnnnnnnnnnnnnnnnnnnnnnnnnnnnnnnnnnnnnnnnnnnnnnnnnnnnnnnnnnnnnnnnnnnnnnnnnnnnnnnnnnnnnnnnnnnnnnnnnnnnnnnnnnnnnnnnnnnnnnnnnnnnnnnnnnnnnnnnnnnnnnnnnnnnnnnnnnnnnnnnnnnnnnnnnnnnnnnnnnnnnnnnnnnnnnnnnnnnnnnnnnnnnnnnnnnnnnnnnnnnnnnnnnnnnnnnnnnnnnnnnnnnnnnnnnnnnnnnnnnnnnnnnnnnnnnnnnnnnnnnnnnnnnnnnnnnnnnnnnnnnnnnnnnnnnnnnnnnnnnnnnnnnnnnnnnnnnnnnnnnnnnnnnnnnnnnnnnnnnnnnnnnnnnnnnnnnnnnnnnnnnnnnnnnnnnnnnnnnnnnnnnnnnnnnnnnnnnnnnnnnnnnnnnnnnnnnnnnnnnnnnnnnnnnnnnnnnnnnnnnnnnnnnnnnnnnnnnnnnnnnnnnnnnnnnnnnnnnnnnnnnnnnnnnnnnnnnnnnnnnnnnnnnnnnnnnnnnnnnnnnnnnnnnnnnnnnnnnnnnnnnnnnnnnnnnnnnnnnnnnnnnnnnnnnnnnnnnnnnnnnnnnnnnnnnnnnnnnnnnnnnnnnnnnnnnnnnnnnnnnnnnnnnnnnnnnnnnnnnnnnnnnnnnnnnnnnnnnnnnnnnnnnnnnnnnnnnnnnnnnnnnnnnnnnnnnnnnnnnnnnnnnnnnnnnnnnnnnnnnnnnnnnnnnnnnnnnnnnnnnnnnnnnnnnnnnnnnnnnnnnnnnnnnnnnnnnnnnnnnnnnnnnnnnnnnnnnnnnnnnnnnnnnnnnnnnnnnnnnnnnnnnnnnnnnnnnnnnnnnnnnnnnnnnnnnnnnnnnnnnnnnnnnnnnnnnnnnnnnnnnnnnnnnnnnnnnnnnnnnnnnnnnnnnnnnnnnnnnnnnnnnnnnnnnnnnnnnnnnnnnnnnnnnnnnnnnnnnnnnnnnnnnnnnnnnnnnnnnnnnnnnnnnnnnnnnnnnnnnnnnnnnnnnnnnnnnnnnnnnnnnnnnnnnnnnnnnnnnnnnnnnnnnnnnnnnnnnnnnnnnnnnnnnnnnnnnnnnnnnnnnnnnnnnnnnnnnnnnnnnnnnnnnnnnnnnnnnnnnnnnnnnnnnnnnnnnnnnnnnnnnnnnnnnnnnnnnnnnnnnnnnnnnnnnnnnnnnnnnnnnnnnnnnnnnnnnnnnnnnnnnnnnnnnnnnnnnnnnnnnnnnnnnnnnnnnnnnnnnnnnnnnnnnnnnnnnnnnnnnnnnnnnnnnnnnnnnnnnnnnnnnnnnnnnnnnnnnnnnnnnnnnnnnnnnnnnnnnnnnnnnnnnnnnnnnnnnnnnnnnnnnnnnnnnnnnnnnnnnnnnnnnnnnnnnnnnnnnnnnnnnnnnnnnnnnnnnnnnnnnnnnnnnnnnnnnnnnnnnnnnnnnnnnnnnnnnnnnnnnnnnnnnnnnnnnnnnnnnnnnnnnnnnnnnnnnnnnnnnnnnnnnnnnnnnnnnnnnnnnnnnnnnnnnnnnnnnnnnnnnnnnnnnnnnnnnnnnnnnnnnnnnnnnnnnnnnnnnnnnnnnnnnnnnnnnnnnnnnnnnnnnnnnnnnnnnnnnnnnnnnnnnnnnnnnnnnnnnnnnnnnnnnnnnnnnnnnnnnnnnnnnnnnnnnnnnnnnnnnnnnnnnnnnnnnnnnnnnnnnnnnnnnnnnnnnnnnnnnnnnnnnnnnnnnnnnnnnnnnnnnnnnnnnnnnnnnnnnnnnnnnnnnnnnnnnnnnnnnnnnnnnnnnnnnnnnnnnnnnnnnnnnnnnnnnnnnnnnnnnnnnnnnnnnnnnnnnnnnnnnnnnnnnnnnnnnnnnnnnnnnnnnnnnnnnnnnnnnnnnnnnnnnnnnnnnnnnnnnnnnnnnnnnnnnnnnnnnnnnnnnnnnnnnnnnnnnnnnnnnnnnnnnnnnnnnnnnnnnnnnnnnnnnnnnnnnnnnnnnnnnnnnnnnnnnnnnnnnnnnnnnnnnnnnnnnnnnnnnnnnnnnnnnnnnnnnnnnnnnnnnnnnnnnnnnnnnnnnnnnnnnnnnnnnnnnnnnnnnnnnnnnnnnnnnnnnnnnnnnnnnnnnnnnnnnnnnnnnnnnnnnnnnnnnnnnnnnnnnnnnnnnnnnnnnnnnnnnnnnnnnnnnnnnnnnnnnnnnnnnnnnnnnnnnnnnnnnnnnnnnnnnnnnnnnnnnnnnnnnnnnnnnnnnnnnnnnnnnnnnnnnnnnnnnnnnnnnnnnnnnnnnnnnnnnnnnnnnnnnnnnnnnnnnnnnnnnnnnnnnnnnnnnnnnnnnnnnnnnnnnnnnnnnnnnnnnnnnnnnnnnnnnnnnnnnnnnnnnnnnnnnnnnnnnnnnnnnnnnnnnnnnnnnnnnnnnnnnnnnnnnnnnnnnnnnnnnnnnnnnnnnnnnnnnnnnnnnnnnnnnnnnnnnnnnnnnnnnnnnnnnnnnnnnnnnnnnnnnnnnnnnnnnnnnnnnnnnnnnnnnnnnnnnnnnnnnnnnnnnnnnnnnnnnnnnnnnnnnnnnnnnnnnnnnnnnnnnnnnnnnnnnnnnnnnnnnnnnnnnnnnnnnnnnnnnnnnnnnnnnnnnnnnnnnnnnnnnnnnnnnnnnnnnnnnnnnnnnnnnnnnnnnnnnnnnnnnnnnnnnnnnnnnnnnnnnnnnnnnnnnnnnnnnnnnnnnnnnnnnnnnnnnnnnnnnnnnnnnnnnnnnnnnnnnnnnnnnnnnnnnnnnnnnnnnnnnnnnnnnnnnnnnnnnnnnnnnnnnnnnnnnnnnnnnnnnnnnnnnnnnnnnnnnnnnnnnnnnnnnnnnnnnnnnnnnnnnnnnnnnnnnnnnnnnnnnnnnnnnnnnnnnnnnnnnnnnnnnnnnnnnnnnnnnnnnnnnnnnnnnnnnnnnnnnnnnnnnnnnnnnnnnnnnnnnnnnnnnnnnnnnnnnnnnnnnnnnnnnnnnnnnnnnnnnnnnnnnnnnnnnnnnnnnnnnnnnnnnnnnnnnnnnnnnnnnnnnnnnnnnnnnnnnnnnnnnnnnnnnnnnnnnnnnnnnnnnnnnnnnnnnnnnnnnnnnnnnnnnnnnnnnnnnnnnnnnnnnnnnnnnnnnnnnnnnnnnnnnnnnnnnnnnnnnnnnnnnnnnnnnnnnnnnnnnnnnnnnnnnnnnnnnnnnnnnnnnnnnnnnnnnnnnnnnnnnnnnnnnnnnnnnnnnnnnnnnnnnnnnnnnnnnnnnnnnnnnnnnnnnnnnnnnnnnnnnnnnnnnnnnnnnnnnnnnnnnnnnnnnnnnnnnnnnnnnnnnnnnnnnnnnnnnnnnnnnnnnnnnnnnnnnnnnnnnnnnnnnnnnnnnnnnnnnnnnnnnnnnnnnnnnnnnnnnnnnnnnnnnnnnnnnnnnnnnnnnnnnnnnnnnnnnnnnnnnnnnnnnnnnnnnnnnnnnnnnnnnnnnnnnnnnnnnnnnnnnnnnnnnnnnnnnnnnnnnnnnnnnnnnnnnnnnnnnnnnnnnnnnnnnnnnnnnnnnnnnnnnnnnnnnnnnnnnnnnnnnnnnnnnnnnnnnnnnnnnnnnnnnnnnnnnnnnnnnnnnnnnnnnnnnnnnnnnnnnnnnnnnnnnnnnnnnnnnnnnnnnnnnnnnnnnnnnnnnnnnnnnnnnnnnnnnnnnnnnnnnnnnnnnnnnnnnnnnnnnnnnnnnnnnnnnnnnnnnnnnnnnnnnnnnnnnnnnnnnnnnnnnnnnnnnnnnnnnnnnnnnnnnnnnnnnnnnnnnnnnnnnnnnnnnnnnnnnnnnnnnnnnnnnnnnnnnnnnnnnnnnnnnnnnnnnnnnnnnnnnnnnnnnnnnnnnnnnnnnnnnnnnnnnnnnnnnnnnnnnnnnnnnnnnnnnnnnnnnnnnnnnnnnnnnnnnnnnnnnnnnnnnnnnnnnnnnnnnnnnnnnnnnnnnnnnnnnnnnnnnnnnnnnnnnnnnnnnnnnnnnnnnnnnnnnnnnnnnnnnnnnnnnnnnnnnnnnnnnnnnnnnnnnnnnnnnnnnnnnnnnnnnnnnnnnnnnnnnnnnnnnnnnnnnnnnnnnnnnnnnnnnnnnnnnnnnnnnnnnnnnnnnnnnnnnnnnnnnnnnnnnnnnnnnnnnnnnnnnnnnnnnnnnnnnnnnnnnnnnnnnnnnnnnnnnnnnnnnnnnnnnnnnnnnnnnnnnnnnnnnnnnnnnnnnnnnnnnnnnnnnnnnnnnnnnnnnnnnnnnnnnnnnnnnnnnnnnnnnnnnnnnnnnnnnnnnnnnnnnnnnnnnnnnnnnnnnnnnnnnnnnnnnnnnnnnnnnnnnnnnnnnnnnnnnnnnnnnnnnnnnnnnnnnnnnnnnnnnnnnnnnnnnnnnnnnnnnnnnnnnnnnnnnnnnnnnnnnnnnnnnnnnnnnnnnnnnnnnnnnnnnnnnnnnnnnnnnnnnnnnnnnnnnnnnnnnnnnnnnnnnnnnnnnnnnnnnnnnnnnnnnnnnnnnnnnnnnnnnnnnnnnnnnnnnnnnnnnnnnnnnnnnnnnnnnnnnnnnnnnnnnnnnnnnnnnnnnnnnnnnnnnnnnnnnnnnnnnnnnnnnnnnnnnnnnnnnnnnnnnnnnnnnnnnnnnnnnnnnnnnnnnnnnnnnnnnnnnnnnnnnnnnnnnnnnnnnnnnnnnnnnnnnnnnnnnnnnnnnnnnnnnnnnnnnnnnnnnnnnnnnnnnnnnnnnnnnnnnnnnnnnnnnnnnnnnnnnnnnnnnnnnnnnnnnnnnnnnnnnnnnnnnnnnnnnnnnnnnnnnnnnnnnnnnnnnnnnnnnnnnnnnnnnnnnnnnnnnnnnnnnnnnnnnnnnnnnnnnnnnnnnnnnnnnnnnnnnnnnnnnnnnnnnnnnnnnnnnnnnnnnnnnnnnnnnnnnnnnnnnnnnnnnnnnnnnnnnnnnnnnnnnnnnnnnnnnnnnnnnnnnnnnnnnnnnnnnnnnnnnnnnnnnnnnnnnnnnnnnnnnnnnnnnnnnnnnnnnnnnnnnnnnnnnnnnnnnnnnnnnnnnnnnnnnnnnnnnnnnnnnnnnnnnnnnnnnnnnnnnnnnnnnnnnnnnnnnnnnnnnnnnnnnnnnnnnnnnnnnnnnnnnnnnnnnnnnnnnnnnnnnnnnnnnnnnnnnnnnnnnnnnnnnnnnnnnnnnnnnnnnnnnnnnnnnnnnnnnnnnnnnnnnnnnnnnnnnnnnnnnnnnnnnnnnnnnnnnnnnnnnnnnnnnnnnnnnnnnnnnnnnnnnnnnnnnnnnnnnnnnnnnnnnnnnnnnnnnnnnnnnnnnnnnnnnnnnnnnnnnnnnnnnnnnnnnnnnnnnnnnnnnnnnnnnnnnnnnnnnnnnnnnnnnnnnnnnnnnnnnnnnnnnnnnnnnnnnnnnnnnnnnnnnnnnnnnnnnnnnnnnnnnnnnnnnnnnnnnnnnnnnnnnnnnnnnnnnnnnnnnnnnnnnnnnnnnnnnnnnnnnnnnnnnnnnnnnnnnnnnnnnnnnnnnnnnnnnnnnnnnnnnnnnnnnnnnnnnnnnnnnnnnnnnnnnnnnnnnnnnnnnnnnnnnnnnnnnnnnnnnnnnnnnnnnnnnnnnnnnnnnnnnnnnnnnnnnnnnnnnnnnnnnnnnnnnnnnnnnnnnnnnnnnnnnnnnnnnnnnnnnnnnnnnnnnnnnnnnnnnnnnnnnnnnnnnnnnnnnnnnnnnnnnnnnnnnnnnnnnnnnnnnnnnnnnnnnnnnnnnnnnnnnnnnnnnnnnnnnnnnnnnnnnnnnnnnnnnnnnnnnnnnnnnnnnnnnnnnnnnnnnnnnnnnnnnnnnnnnnnnnnnnnnnnnnnnnnnnnnnnnnnnnnnnnnnnnnnnnnnnnnnnnnnnnnnnnnnnnnnnnnnnnnnnnnnnnnnnnnnnnnnnnnnnnnnnnnnnnnnnnnnnnnnnnnnnnnnnnnnnnnnnnnnnnnnnnnnnnnnnnnnnnnnnnnnnnnnnnnnnnnnnnnnnnnnnnnnnnnnnnnnnnnnnnnnnnnnnnnnnnnnnnnnnnnnnnnnnnnnnnnnnnnnnnnnnnnnnnnnnnnnnnnnnnnnnnnnnnnnnnnnnnnnnnnnnnnnnnnnnnnnnnnnnnnnnnnnnnnnnnnnnnnnnnnnnnnnnnnnnnnnnnnnnnnnnnnnnnnnnnnnnnnnnnnnnnnnnnnnnnnnnnnnnnnnnnnnnnnnnnnnnnnnnnnnnnnnnnnnnnnnnnnnnnnnnnnnnnnnnnnnnnnnnnnnnnnnnnnnnnnnnnnnnnnnnnnnnnnnnnnnnnnnnnnnnnnnnnnnnnnnnnnnnnnnnnnnnnnnnnnnnnnnnnnnnnnnnnnnnnnnnnnnnnnnnnnnnnnnnnnnnnnnnnnnnnnnnnnnnnnnnnnnnnnnnnnnnnnnnnnnnnnnnnnnnnnnnnnnnnnnnnnnnnnnnnnnnnnnnnnnnnnnnnnnnnnnnnnnnnnnnnnnnnnnnnnnnnnnnnnnnnnnnnnnnnnnnnnnnnnnnnnnnnnnnnnnnnnnnnnnnnnnnnnnnnnnnnnnnnnnnnnnnnnnnnnnnnnnnnnnnnnnnnnnnnnnnnnnnnnnnnnnnnnnnnnnnnnnnnnnnnnnnnnnnnnnnnnnnnnnnnnnnnnnnnnnnnnnnnnnnnnnnnnnnnnnnnnnnnnnnnnnnnnnnnnnnnnnnnnnnnnnnnnnnnnnnnnnnnnnnnnnnnnnnnnnnnnnnnnnnnnnnnnnnnnnnnnnnnnnnnnnnnnnnnnnnnnnnnnnnnnnnnnnnnnnnnnnnnnnnnnnnnnnnnnnnnnnnnnnnnnnnnnnnnnnnnnnnnnnnnnnnnnnnnnnnnnnnnnnnnnnnnnnnnnnnnnnnnnnnnnnnnnnnnnnnnnnnnnnnnnnnnnnnnnnnnnnnnnnnnnnnnnnnnnnnnnnnnnnnnnnnnnnnnnnnnnnnnnnnnnnnnnnnnnnnnnnnnnnnnnnnnnnnnnnnnnnnnnnnnnnnnnnnnnnnnnnnnnnnnnnnnnnnnnnnnnnnnnnnnnnnnnnnnnnnnnnnnnnnnnnnnnnnnnnnnnnnnnnnnnnnnnnnnnnnnnnnnnnnnnnnnnnnnnnnnnnnnnnnnnnnnnnnnnnnnnnnnnnnnnnnnnnnnnnnnnnnnnnnnnnnnnnnnnnnnnnnnnnnnnnnnnnnnnnnnnnnnnnnnnnnnnnnnnnnnnnnnnnnnnnnnnnnnnnnnnnnnnnnnnnnnnnnnnnnnnnnnnnnnnnnnnnnnnnnnnnnnnnnnnnnnnnnnnnnnnnnnnnnnnnnnnnnnnnnnnnnnnnnnnnnnnnnnnnnnnnnnnnnnnnnnnnnnnnnnnnnnnnnnnnnnnnnnnnnnnnnnnnnnnnnnnnnnnnnnnnnnnnnnnnnnnnnnnnnnnnnnnnnnnnnnnnnnnnnnnnnnnnnnnnnnnnnnnnnnnnnnnnnnnnnnnnnnnnnnnnnnnnnnnnnnnnnnnnnnnnnnnnnnnnnnnnnnnnnnnnnnnnnnnnnnnnnnnnnnnnnnnnnnnnnnnnnnnnnnnnnnnnnnnnnnnnnnnnnnnnnnnnnnnnnnnnnnnnnnnnnnnnnnnnnnnnnnnnnnnnnnnnnnnnnnnnnnnnnnnnnnnnnnnnnnnnnnnnnnnnnnnnnnnnnnnnnnnnnnnnnnnnnnnnnnnnnnnnnnnnnnnnnnnnnnnnnnnnnnnnnnnnnnnnnnnnnnnnnnnnnnnnnnnnnnnnnnnnnnnnnnnnnnnnnnnnnnnnnnnnnnnnnnnnnnnnnnnnnnnnnnnnnnnnnnnnnnnnnnnnnnnnnnnnnnnnnnnnnnnnnnnnnnnnnnnnnnnnnnnnnnnnnnnnnnnnnnnnnnnnnnnnnnnnnnnnnnnnnnnnnnnnnnnnnnnnnnnnnnnnnnnnnnnnnnnnnnnnnnnnnnnnnnnnnnnnnnnnnnnnnnnnnnnnnnnnnnnnnnnnnnnnnnnnnnnnnnnnnnnnnnnnnnnnnnnnnnnnnnnnnnnnnnnnnnnnnnnnnnnnnnnnnnnnnnnnnnnnnnnnnnnnnnnnnnnnnnnnnnnnnnnnnnnnnnnnnnnnnnnnnnnnnnnnnnnnnnnnnnnnnnnnnnnnnnnnnnnnnnnnnnnnnnnnnnnnnnnnnnnnnnnnnnnnnnnnnnnnnnnnnnnnnnnnnnnnnnnnnnnnnnnnnnnnnnnnnnnnnnnnnnnnnnnnnnnnnnnnnnnnnnnnnnnnnnnnnnnnnnnnnnnnnnnnnnnnnnnnnnnnnnnnnnnnnnnnnnnnnnnnnnnnnnnnnnnnnnnnnnnnnnnnnnnnnnnnnnnnnnnnnnnnnnnnnnnnnnnnnnnnnnnnnnnnnnnnnnnnnnnnnnnnnnnnnnnnnnnnnnnnnnnnnnnnnnnnnnnnnnnnnnnnnnnnnnnnnnnnnnnnnnnnnnnnnnnnnnnnnnnnnnnnnnnnnnnnnnnnnnnnnnnnnnnnnnnnnnnnnnnnnnnnnnnnnnnnnnnnnnnnnnnnnnnnnnnnnnnnnnnnnnnnnnnnnnnnnnnnnnnnnnnnnnnnnnnnnnnnnnnnnnnnnnnnnnnnnnnnnnnnnnnnnnnnnnnnnnnnnnnnnnnnnnnnnnnnnnnnnnnnnnnnnnnnnnnnnnnnnnnnnnnnnnnnnnnnnnnnnnnnnnnnnnnnnnnnnnnnnnnnnnnnnnnnnnnnnnnnnnnnnnnnnnnnnnnnnnnnnnnnnnnnnnnnnnnnnnnnnnnnnnnnnnnnnnnnnnnnnnnnnnnnnnnnnnnnnnnnnnnnnnnnnnnnnnnnnnnnnnnnnnnnnnnnnnnnnnnnnnnnnnnnnnnnnnnnnnnnnnnnnnnnnnnnnnnnnnnnnnnnnnnnnnnnnnnnnnnnnnnnnnnnnnnnnnnnnnnnnnnnnnnnnnnnnnnnnnnnnnnnnnnnnnnnnnnnnnnnnnnnnnnnnnnnnnnnnnnnnnnnnnnnnnnnnnnnnnnnnnnnnnnnnnnnnnnnnnnnnnnnnnnnnnnnnnnnnnnnnnnnnnnnnnnnnnnnnnnnnnnnnnnnnnnnnnnnnnnnnnnnnnnnnnnnnnnnnnnnnnnnnnnnnnnnnnnnnnnnnnnnnnnnnnnnnnnnnnnnnnnnnnnnnnnnnnnnnnnnnnnnnnnnnnnnnnnnnnnnnnnnnnnnnnnnnnnnnnnnnnnnnnnnnnnnnnnnnnnnnnnnnnnnnnnnnnnnnnnnnnnnnnnnnnnnnnnnnnnnnnnnnnnnnnnnnnnnnnnnnnnnnnnnnnnnnnnnnnnnnnnnnnnnnnnnnnnnnnnnnnnnnnnnnnnnnnnnnnnnnnnnnnnnnnnnnnnnnnnnnnnnnnnnnnnnnnnnnnnnnnnnnnnnnnnnnnnnnnnnnnnnnnnnnnnnnnnnnnnnnnnnnnnnnnnnnnnnnnnnnnnnnnnnnnnnnnnnnnnnnnnnnnnnnnnnnnnnnnnnnnnnnnnnnnnnnnnnnnnnnnnnnnnnnnnnnnnnnnnnnnnnnnnnnnnnnnnnnnnnnnnnnnnnnnnnnnnnnnnnnnnnnnnnnnnnnnnnnnnnnnnnnnnnnnnnnnnnnnnnnnnnnnnnnnnnnnnnnnnnnnnnnnnnnnnnnnnnnnnnnnnnnnnnnnnnnnnnnnnnnnnnnnnnnnnnnnnnnnnnnnnnnnnnnnnnnnnnnnnnnnnnnnnnnnnnnnnnnnnnnnnnnnnnnnnnnnnnnnnnnnnnnnnnnnnnnnnnnnnnnnnnnnnnnnnnnnnnnnnnnnnnnnnnnnnnnnnnnnnnnnnnnnnnnnnnnnnnnnnnnnnnnnnnnnnnnnnnnnnnnnnnnnnnnnnnnnnnnnnnnnnnnnnnnnnnnnnnnnnnnnnnnnnnnnnnnnnnnnnnnnnnnnnnnnnnnnnnnnnnnnnnnnnnnnnnnnnnnnnnnnnnnnnnnnnnnnnnnnnnnnnnnnnnnnnnnnnnnnnnnnnnnnnnnnnnnnnnnnnnnnnnnnnnnnnnnnnnnnnnnnnnnnnnnnnnnnnnnnnnnnnnnnnnnnnnnnnnnnnnnnnnnnnnnnnnnnnnnnnnnnnnnnnnnnnnnnnnnnnnnnnnnnnnnnnnnnnnnnnnnnnnnnnnnnnnnnnnnnnnnnnnnnnnnnnnnnnnnnnnnnnnnnnnnnnnnnnnnnnnnnnnnnnnnnnnnnnnnnnnnnnnnnnnnnnnnnnnnnnnnnnnnnnnnnnnnnnnnnnnnnnnnnnnnnnnnnnnnnnnnnnnnnnnnnnnnnnnnnnnnnnnnnnnnnnnnnnnnnnnnnnnnnnnnnnnnnnnnnnnnnnnnnnnnnnnnnnnnnnnnnnnnnnnnnnnnnnnnnnnnnnnnnnnnnnnnnnnnnnnnnnnnnnnnnnnnnnnnnnnnnnnnnnnnnnnnnnnnnnnnnnnnnnnnnnnnnnnnnnnnnnnnnnnnnnnnnnnnnnnnnnnnnnnnnnnnnnnnnnnnnnnnnnnnnnnnnnnnnnnnnnnnnnnnnnnnnnnnnnnnnnnnnnnnnnnnnnnnnnnnnnnnnnnnnnnnnnnnnnnnnnnnnnnnnnnnnnnnnnnnnnnnnnnnnnnnnnnnnnnnnnnnnnnnnnnnnnnnnnnnnnnnnnnnnnnnnnnnnnnnnnnnnnnnnnnnnnnnnnnnnnnnnnnnnnnnnnnnnnnnnnnnnnnnnnnnnnnnnnnnnnnnnnnnnnnnnnnnnnnnnnnnnnnnnnnnnnnnnnnnnnnnnnnnnnnnnnnnnnnnnnnnnnnnnnnnnnnnnnnnnnnnnnnnnnnnnnnnnnnnnnnnnnnnnnnnnnnnnnnnnnnnnnnnnnnnnnnnnnnnnnnnnnnnnnnnnnnnnnnnnnnnnnnnnnnnnnnnnnnnnnnnnnnnnnnnnnnnnnnnnnnnnnnnnnnnnnnnnnnnnnnnnnnnnnnnnnnnnnnnnnnnnnnnnnnnnnnnnnnnnnnnnnnnnnnnnnnnnnnnnnnnnnnnnnnnnnnnnnnnnnnnnnnnnnnnnnnnnnnnnnnnnnnnnnnnnnnnnnnnnnnnnnnnnnnnnnnnnnnnnnnnnnnnnnnnnnnnnnnnnnnnnnnnnnnnnnnnnnnnnnnnnnnnnnnnnnnnnnnnnnnnnnnnnnnnnnnnnnnnnnnnnnnnnnnnnnnnnnnnnnnnnnnnnnnnnnnnnnnnnnnnnnnnnnnnnnnnnnnnnnnnnnnnnnnnnnnnnnnnnnnnnnnnnnnnnnnnnnnnnnnnnnnnnnnnnnnnnnnnnnnnnnnnnnnnnnnnnnnnnnnnnnnnnnnnnnnnnnnnnnnnnnnnnnnnnnnnnnnnnnnnnnnnnnnnnnnnnnnnnnnnnnnnnnnnnnnnnnnnnnnnnnnnnnnnnnnnnnnnnnnnnnnnnnnnnnnnnnnnnnnnnnnnnnnnnnnnnnnnnnnnnnnnnnnnnnnnnnnnnnnnnnnnnnnnnnnnnnnnnnnnnnnnnnnnnnnnnnnnnnnnnnnnnnnnnnnnnnnnnnnnnnnnnnnnnnnnnnnnnnnnnnnnnnnnnnnnnnnnnnnnnnnnnnnnnnnnnnnnnnnnnnnnnnnnnnnnnnnnnnnnnnnnnnnnnnnnnnnnnnnnnnnnnnnnnnnnnnnnnnnnnnnnnnnnnnnnnnnnnnnnnnnnnnnnnnnnnnnnnnnnnnnnnnnnnnnnnnnnnnnnnnnnnnnnnnnnnnnnnnnnnnnnnnnnnnnnnnnnnnnnnnnnnnnnnnnnnnnnnnnnnnnnnnnnnnnnnnnnnnnnnnnnnnnnnnnnnnnnnnnnnnnnnnnnnnnnnnnnnnnnnnnnnnnnnnnnnnnnnnnnnnnnnnnnnnnnnnnnnnnnnnnnnnnnnnnnnnnnnnnnnnnnnnnnnnnnnnnnnnnnnnnnnnnnnnnnnnnnnnnnnnnnnnnnnnnnnnnnnnnnnnnnnnnnnnnnnnnnnnnnnnnnnnnnnnnnnnnnnnnnnnnnnnnnnnnnnnnnnnnnnnnnnnnnnnnnnnnnnnnnnnnnnnnnnnnnnnnnnnnnnnnnnnnnnnnnnnnnnnnnnnnnnnnnnnnnnnnnnnnnnnnnnnnnnnnnnnnnnnnnnnnnnnnnnnnnnnnnnnnnnnnnnnnnnnnnnnnnnnnnnnnnnnnnnnnnnnnnnnnnnnnnnnnnnnnnnnnnnnnnnnnnnnnnnnnnnnnnnnnnnnnnnnnnnnnnnnnnnnnnnnnnnnnnnnnnnnnnnnnnnnnnnnnnnnnnnnnnnnnnnnnnnnnnnnnnnnnnnnnnnnnnnnnnnnnnnnnnnnnnnnnnnnnnnnnnnnnnnnnnnnnnnnnnnnnnnnnnnnnnnnnnnnnnnnnnnnnnnnnnnnnnnnnnnnnnnnnnnnnnnnnnnnnnnnnnnnnnnnnnnnnnnnnnnnnnnnnnnnnnnnnnnnnnnnnnnnnnnnnnnnnnnnnnnnnnnnnnnnnnnnnnnnnnnnnnnnnnnnnnnnnnnnnnnnnnnnnnnnnnnnnnnnnnnnnnnnnnnnnnnnnnnnnnnnnnnnnnnnnnnnnnnnnnnnnnnnnnnnnnnnnnnnnnnnnnnnnnnnnnnnnnnnnnnnnnnnnnnnnnnnnnnnnnnnnnnnnnnnnnnnnnnnnnnnnnnnnnnnnnnnnnnnnnnnnnnnnnnnnnnnnnnnnnnnnnnnnnnnnnnnnnnnnnnnnnnnnnnnnnnnnnnnnnnnnnnnnnnnnnnnnnnnnnnnnnnnnnnnnnnnnnnnnnnnnnnnnnnnnnnnnnnnnnnnnnnnnnnnnnnnnnnnnnnnnnnnnnnnnnnnnnnnnnnnnnnnnnnnnnnnnnnnnnnnnnnnnnnnnnnnnnnnnnnnnnnnnnnnnnnnnnnnnnnnnnnnnnnnnnnnnnnnnnnnnnnnnnnnnnnnnnnnnnnnnnnnnnnnnnnnnnnnnnnnnnnnnnnnnnnnnnnnnnnnnnnnnnnnnnnnnnnnnnnnnnnnnnnnnnnnnnnnnnnnnnnnnnnnnnnnnnnnnnnnnnnnnnnnnnnnnnnnnnnnnnnnnnnnnnnnnnnnnnnnnnnnnnnnnnnnnnnnnnnnnnnnnnnnnnnnnnnnnnnnnnnnnnnnnnnnnnnnnnnnnnnnnnnnnnnnnnnnnnnnnnnnnnnnnnnnnnnnnnnnnnnnnnnnnnnnnnnnnnnnnnnnnnnnnnnnnnnnnnnnnnnnnnnnnnnnnnnnnnnnnnnnnnnnnnnnnnnnnnnnnnnnnnnnnnnnnnnnnnnnnnnnnnnnnnnnnnnnnnnnnnnnnnnnnnnnnnnnnnnnnnnnnnnnnnnnnnnnnnnnnnnnnnnnnnnnnnnnnnnnnnnnnnnnnnnnnnnnnnnnnnnnnnnnnnnnnnnnnnnnnnnnnnnnnnnnnnnnnnnnnnnnnnnnnnnnnnnnnnnnnnnnnnnnnnnnnnnnnnnnnnnnnnnnnnnnnnnnnnnnnnnnnnnnnnnnnnnnnnnnnnnnnnnnnnnnnnnnnnnnnnnnnnnnnnnnnnnnnnnnnnnnnnnnnnnnnnnnnnnnnnnnnnnnnnnnnnnnnnnnnnnnnnnnnnnnnnnnnnnnnnnnnnnnnnnnnnnnnnnnnnnnnnnnnnnnnnnnnnnnnnnnnnnnnnnnnnnnnnnnnnnnnnnnnnnnnnnnnnnnnnnnnnnnnnnnnnnnnnnnnnnnnnnnnnnnnnnnnnnnnnnnnnnnnnnnnnnnnnnnnnnnnnnnnnnnnnnnnnnnnnnnnnnnnnnnnnnnnnnnnnnnnnnnnnnnnnnnnnnnnnnnnnnnnnnnnnnnnnnnnnnnnnnnnnnnnnnnnnnnnnnnnnnnnnnnnnnnnnnnnnnnnnnnnnnnnnnnnnnnnnnnnnnnnnnnnnnnnnnnnnnnnnnnnnnnnnnnnnnnnnnnnnnnnnnnnnnnnnnnnnnnnnnnnnnnnnnnnnnnnnnnnnnnnnnnnnnnnnnnnnnnnnnnnnnnnnnnnnnnnnnnnnnnnnnnnnnnnnnnnnnnnnnnnnnnnnnnnnnnnnnnnnnnnnnnnnnnnnnnnnnnnnnnnnnnnnnnnnnnnnnnnnnnnnnnnnnnnnnnnnnnnnnnnnnnnnnnnnnnnnnnnnnnnnnnnnnnnnnnnnnnnnnnnnnnnnnnnnnnnnnnnnnnnnnnnnnnnnnnnnnnnnnnnnnnnnnnnnnnnnnnnnnnnnnnnnnnnnnnnnnnnnnnnnnnnnnnnnnnnnnnnnnnnnnnnnnnnnnnnnnnnnnnnnnnnnnnnnnnnnnnnnnnnnnnnnnnnnnnnnnnnnnnnnnnnnnnnnnnnnnnnnnnnnnnnnnnnnnnnnnnnnnnnnnnnnnnnnnnnnnnnnnnnnnnnnnnnnnnnnnnnnnnnnnnnnnnnnnnnnnnnnnnnnnnnnnnnnnnnnnnnnnnnnnnnnnnnnnnnnnnnnnnnnnnnnnnnnnnnnnnnnnnnnnnnnnnnnnnnnnnnnnnnnnnnnnnnnnnnnnnnnnnnnnnnnnnnnnnnnnnnnnnnnnnnnnnnnnnnnnnnnnnnnnnnnnnnnnnnnnnnnnnnnnnnnnnnnnnnnnnnnnnnnnnnnnnnnnnnnnnnnnnnnnnnnnnnnnnnnnnnnnnnnnnnnnnnnnnnnnnnnnnnnnnnnnnnnnnnnnnnnnnnnnnnnnnnnnnnnnnnnnnnnnnnnnnnnnnnnnnnnnnnnnnnnnnnnnnnnnnnnnnnnnnnnnnnnnnnnnnnnnnnnnnnnnnnnnnnnnnnnnnnnnnnnnnnnnnnnnnnnnnnnnnnnnnnnnnnnnnnnnnnnnnnnnnnnnnnnnnnnnnnnnnnnnnnnnnnnnnnnnnnnnnnnnnnnnnnnnnnnnnnnnnnnnnnnnnnnnnnnnnnnnnnnnnnnnnnnnnnnnnnnnnnnnnnnnnnnnnnnnnnnnnnnnnnnnnnnnnnnnnnnnnnnnnnnnnnnnnnnnnnnnnnnnnnnnnnnnnnnnnnnnnnnnnnnnnnnnnnnnnnnnnnnnnnnnnnnnnnnnnnnnnnnnnnnnnnnnnnnnnnnnnnnnnnnnnnnnnnnnnnnnnnnnnnnnnnnnnnnnnnnnnnnnnnnnnnnnnnnnnnnnnnnnnnnnnnnnnnnnnnnnnnnnnnnnnnnnnnnnnnnnnnnnnnnnnnnnnnnnnnnnnnnnnnnnnnnnnnnnnnnnnnnnnnnnnnnnnnnnnnnnnnnnnnnnnnnnnnnnnnnnnnnnnnnnnnnnnnnnnnnnnnnnnnnnnnnnnnnnnnnnnnnnnnnnnnnnnnnnnnnnnnnnnnnnnnnnnnnnnnnnnnnnnnnnnnnnnnnnnnnnnnnnnnnnnnnnnnnnnnnnnnnnnnnnnnnnnnnnnnnnnnnnnnnnnnnnnnnnnnnnnnnnnnnnnnnnnnnnnnnnnnnnnnnnnnnnnnnnnnnnnnnnnnnnnnnnnnnnnnnnnnnnnnnnnnnnnnnnnnnnnnnnnnnnnnnnnnnnnnnnnnnnnnnnnnnnnnnnnnnnnnnnnnnnnnnnnnnnnnnnnnnnnnnnnnnnnnnnnnnnnnnnnnnnnnnnnnnnnnnnnnnnnnnnnnnnnnnnnnnnnnnnnnnnnnnnnnnnnnnnnnnnnnnnnnnnnnnnnnnnnnnnnnnnnnnnnnnnnnnnnnnnnnnnnnnnnnnnnnnnnnnnnnnnnnnnnnnnnnnnnnnnnnnnnnnnnnnnnnnnnnnnnnnnnnnnnnnnnnnnnnnnnnnnnnnnnnnnnnnnnnnnnnnnnnnnnnnnnnnnnnnnnnnnnnnnnnnnnnnnnnnnnnnnnnnnnnnnnnnnnnnnnnnnnnnnnnnnnnnnnnnnnnnnnnnnnnnnnnnnnnnnnnnnnnnnnnnnnnnnnnnnnnnnnnnnnnnnnnnnnnnnnnnnnnnnnnnnnnnnnnnnnnnnnnnnnnnnnnnnnnnnnnnnnnnnnnnnnnnnnnnnnnnnnnnnnnnnnnnnnnnnnnnnnnnnnnnnnnnnnnnnnnnnnnnnnnnnnnnnnnnnnnnnnnnnnnnnnnnnnnnnnnnnnnnnnnnnnnnnnnnnnnnnnnnnnnnnnnnnnnnnnnnnnnnnnnnnnnnnnnnnnnnnnnnnnnnnnnnnnnnnnnnnnnnnnnnnnnnnnnnnnnnnnnnnnnnnnnnnnnnnnnnnnnnnnnnnnnnnnnnnnnnnnnnnnnnnnnnnnnnnnnnnnnnnnnnnnnnnnnnnnnnnnnnnnnnnnnnnnnnnnnnnnnnnnnnnnnnnnnnnnnnnnnnnnnnnnnnnnnnnnnnnnnnnnnnnnnnnnnnnnnnnnnnnnnnnnnnnnnnnnnnnnnnnnnnnnnnnnnnnnnnnnnnnnnnnnnnnnnnnnnnnnnnnnnnnnnnnnnnnnnnnnnnnnnnnnnnnnnnnnnnnnnnnnnnnnnnnnnnnnnnnnnnnnnnnnnnnnnnnnnnnnnnnnnnnnnnnnnnnnnnnnnnnnnnnnnnnnnnnnnnnnnnnnnnnnnnnnnnnnnnnnnnnnnnnnnnnnnnnnnnnnnnnnnnnnnnnnnnnnnnnnnnnnnnnnnnnnnnnnnnnnnnnnnnnnnnnnnnnnnnnnnnnnnnnnnnnnnnnnnnnnnnnnnnnnnnnnnnnnnnnnnnnnnnnnnnnnnnnnnnnnnnnnnnnnnnnnnnnnnnnnnnnnnnnnnnnnnnnnnnnnnnnnnnnnnnnnnnnnnnnnnnnnnnnnnnnnnnnnnnnnnnnnnnnnnnnnnnnnnnnnnnnnnnnnnnnnnnnnnnnnnnnnnnnnnnnnnnnnnnnnnnnnnnnnnnnnnnnnnnnnnnnnnnnnnnnnnnnnnnnnnnnnnnnnnnnnnnnnnnnnnnnnnnnnnnnnnnnnnnnnnnnnnnnnnnnnnnnnnnnnnnnnnnnnnnnnnnnnnnnnnnnnnnnnnnnnnnnnnnnnnnnnnnnnnnnnnnnnnnnnnnnnnnnnnnnnnnnnnnnnnnnnnnnnnnnnnnnnnnnnnnnnnnnnnnnnnnnnnnnnnnnnnnnnnnnnnnnnnnnnnnnnnnnnnnnnnnnnnnnnnnnnnnnnnnnnnnnnnnnnnnnnnnnnnnnnnnnnnnnnnnnnnnnnnnnnnnnnnnnnnnnnnnnnnnnnnnnnnnnnnnnnnnnnnnnnnnnnnnnnnnnnnnnnnnnnnnnnnnnnnnnnnnnnnnnnnnnnnnnnnnnnnnnnnnnnnnnnnnnnnnnnnnnnnnnnnnnnnnnnnnnnnnnnnnnnnnnnnnnnnnnnnnnnnnnnnnnnnnnnnnnnnnnnnnnnnnnnnnnnnnnnnnnnnnnnnnnnnnnnnnnnnnnnnnnnnnnnnnnnnnnnnnnnnnnnnnnnnnnnnnnnnnnnnnnnnnnnnnnnnnnnnnnnnnnnnnnnnnnnnnnnnnnnnnnnnnnnnnnnnnnnnnnnnnnnnnnnnnnnnnnnnnnnnnnnnnnnnnnnnnnnnnnnnnnnnnnnnnnnnnnnnnnnnnnnnnnnnnnnnnnnnnnnnnnnnnnnnnnnnnnnnnnnnnnnnnnnnnnnnnnnnnnnnnnnnnnnnnnnnnnnnnnnnnnnnnnnnnnnnnnnnnnnnnnnnnnnnnnnnnnnnnnnnnnnnnnnnnnnnnnnnnnnnnnnnnnnnnnnnnnnnnnnnnnnnnnnnnnnnnnnnnnnnnnnnnnnnnnnnnnnnnnnnnnnnnnnnnnnnnnnnnnnnnnnnnnnnnnnnnnnnnnnnnnnnnnnnnnnnnnnnnnnnnnnnnnnnnnnnnnnnnnnnnnnnnnnnnnnnnnnnnnnnnnnnnnnnnnnnnnnnnnnnnnnnnnnnnnnnnnnnnnnnnnnnnnnnnnnnnnnnnnnnnnnnnnnnnnnnnnnnnnnnnnnnnnnnnnnnnnnnnnnnnnnnnnnnnnnnnnnnnnnnnnnnnnnnnnnnnnnnnnnnnnnnnnnnnnnnnnnnnnnnnnnnnnnnnnnnnnnnnnnnnnnnnnnnnnnnnnnnnnnnnnnnnnnnnnnnnnnnnnnnnnnnnnnnnnnnnnnnnnnnnnnnnnnnnnnnnnnnnnnnnnnnnnnnnnnnnnnnnnnnnnnnnnnnnnnnnnnnnnnnnnnnnnnnnnnnnnnnnnnnnnnnnnnnnnnnnnnnnnnnnnnnnnnnnnnnnnnnnnnnnnnnnnnnnnnnnnnnnnnnnnnnnnnnnnnnnnnnnnnnnnnnnnnnnnnnnnnnnnnnnnnnnnnnnnnnnnnnnnnnnnnnnnnnnnnnnnnnnnnnnnnnnnnnnnnnnnnnnnnnnnnnnnnnnnnnnnnnnnnnnnnnnnnnnnnnnnnnnnnnnnnnnnnnnnnnnnnnnnnnnnnnnnnnnnnnnnnnnnnnnnnnnnnnnnnnnnnnnnnnnnnnnnnnnnnnnnnnnnnnnnnnnnnnnnnnnnnnnnnnnnnnnnnnnnnnnnnnnnnnnnnnnnnnnnnnnnnnnnnnnnnnnnnnnnnnnnnnnnnnnnnnnnnnnnnnnnnnnnnnnnnnnnnnnnnnnnnnnnnnnnnnnnnnnnnnnnnnnnnnnnnnnnnnnnnnnnnnnnnnnnnnnnnnnnnnnnnnnnnnnnnnnnnnnnnnnnnnnnnnnnnnnnnnnnnnnnnnnnnnnnnnnnnnnnnnnnnnnnnnnnnnnnnnnnnnnnnnnnnnnnnnnnnnnnnnnnnnnnnnnnnnnnnnnnnnnnnnnnnnnnnnnnnnnnnnnnnnnnnnnnnnnnnnnnnnnnnnnnnnnnnnnnnnnnnnnnnnnnnnnnnnnnnnnnnnnnnnnnnnnnnnnnnnnnnnnnnnnnnnnnnnnnnnnnnnnnnnnnnnnnnnnnnnnnnnnnnnnnnnnnnnnnnnnnnnnnnnnnnnnnnnnnnnnnnnnnnnnnnnnnnnnnnnnnnnnnnnnnnnnnnnnnnnnnnnnnnnnnnnnnnnnnnnnnnnnnnnnnnnnnnnnnnnnnnnnnnnnnnnnnnnnnnnnnnnnnnnnnnnnnnnnnnnnnnnnnnnnnnnnnnnnnnnnnnnnnnnnnnnnnnnnnnnnnnnnnnnnnnnnnnnnnnnnnnnnnnnnnnnnnnnnnnnnnnnnnnnnnnnnnnnnnnnnnnnnnnnnnnnnnnnnnnnnnnnnnnnnnnnnnnnnnnnnnnnnnnnnnnnnnnnnnnnnnnnnnnnnnnnnnnnnnnnnnnnnnnnnnnnnnnnnnnnnnnnnnnnnnnnnnnnnnnnnnnnnnnnnnnnnnnnnnnnnnnnnnnnnnnnnnnnnnnnnnnnnnnnnnnnnnnnnnnnnnnnnnnnnnnnnnnnnnnnnnnnnnnnnnnnnnnnnnnnnnnnnnnnnnnnnnnnnnnnnnnnnnnnnnnnnnnnnnnnnnnnnnnnnnnnnnnnnnnnnnnnnnnnnnnnnnnnnnnnnnnnnnnnnnnnnnnnnnnnnnnnnnnnnnnnnnnnnnnnnnnnnnnnnnnnnnnnnnnnnnnnnnnnnnnnnnnnnnnnnnnnnnnnnnnnnnnnnnnnnnnnnnnnnnnnnnnnnnnnnnnnnnnnnnnnnnnnnnnnnnnnnnnnnnnnnnnnnnnnnnnnnnnnnnnnnnnnnnnnnnnnnnnnnnnnnnnnnnnnnnnnnnnnnnnnnnnnnnnnnnnnnnnnnnnnnnnnnnnnnnnnnnnnnnnnnnnnnnnnnnnnnnnnnnnnnnnnnnnnnnnnnnnnnnnnnnnnnnnnnnnnnnnnnnnnnnnnnnnnnnnnnnnnnnnnnnnnnnnnnnnnnnnnnnnnnnnnnnnnnnnnnnnnnnnnnnnnnnnnnnnnnnnnnnnnnnnnnnnnnnnnnnnnnnnnnnnnnnnnnnnnnnnnnnnnnnnnnnnnnnnnnnnnnnnnnnnnnnnnnnnnnnnnnnnnnnnnnnnnnnnnnnnnnnnnnnnnnnnnnnnnnnnnnnnnnnnnnnnnnnnnnnnnnnnnnnnnnnnnnnnnnnnnnnnnnnnnnnnnnnnnnnnnnnnnnnnnnnnnnnnnnnnnnnnnnnnnnnnnnnnnnnnnnnnnnnnnnnnnnnnnnnnnnnnnnnnnnnnnnnnnnnnnnnnnnnnnnnnnnnnnnnnnnnnnnnnnnnnnnnnnnnnnnnnnnnnnnnnnnnnnnnnnnnnnnnnnnnnnnnnnnnnnnnnnnnnnnnnnnnnnnnnnnnnnnnnnnnnnnnnnnnnnnnnnnnnnnnnnnnnnnnnnnnnnnnnnnnnnnnnnnnnnnnnnnnnnnnnnnnnnnnnnnnnnnnnnnnnnnnnnnnnnnnnnnnnnnnnnnnnnnnnnnnnnnnnnnnnnnnnnnnnnnnnnnnnnnnnnnnnnnnnnnnnnnnnnnnnnnnnnnnnnnnnnnnnnnnnnnnnnnnnnnnnnnnnnnnnnnnnnnnnnnnnnnnnnnnnnnnnnnnnnnnnnnnnnnnnnnnnnnnnnnnnnnnnnnnnnnnnnnnnnnnnnnnnnnnnnnnnnnnnnnnnnnnnnnnnnnnnnnnnnnnnnnnnnnnnnnnnnnnnnnnnnnnnnnnnnnnnnnnnnnnnnnnnnnnnnnnnnnnnnnnnnnnnnnnnnnnnnnnnnnnnnnnnnnnnnnnnnnnnnnnnnnnnnnnnnnnnnnnnnnnnnnnnnnnnnnnnnnnnnnnnnnnnnnnnnnnnnnnnnnnnnnnnnnnnnnnnnnnnnnnnnnnnnnnnnnnnnnnnnnnnnnnnnnnnnnnnnnnnnnnnnnnnnnnnnnnnnnnnnnnnnnnnnnnnnnnnnnnnnnnnnnnnnnnnnnnnnnnnnnnnnnnnnnnnnnnnnnnnnnnnnnnnnnnnnnnnnnnnnnnnnnnnnnnnnnnnnnnnnnnnnnnnnnnnnnnnnnnnnnnnnnnnnnnnnnnnnnnnnnnnnnnnnnnnnnnnnnnnnnnnnnnnnnnnnnnnnnnnnnnnnnnnnnnnnnnnnnnnnnnnnnnnnnnnnnnnnnnnnnnnnnnnnnnnnnnnnnnnnnnnnnnnnnnnnnnnnnnnnnnnnnnnnnnnnnnnnnnnnnnnnnnnnnnnnnnnnnnnnnnnnnnnnnnnnnnnnnnnnnnnnnnnnnnnnnnnnnnnnnnnnnnnnnnnnnnnnnnnnnnnnnnnnnnnnnnnnnnnnnnnnnnnnnnnnnnnnnnnnnnnnnnnnnnnnnnnnnnnnnnnnnnnnnnnnnnnnnnnnnnnnnnnnnnnnnnnnnnnnnnnnnnnnnnnnnnnnnnnnnnnnnnnnnnnnnnnnnnnnnnnnnnnnnnnnnnnnnnnnnnnnnnnnnnnnnnnnnnnnnnnnnnnnnnnnnnnnnnnnnnnnnnnnnnnnnnnnnnnnnnnnnnnnnnnnnnnnnnnnnnnnnnnnnnnnnnnnnnnnnnnnnnnnnnnnnnnnnnnnnnnnnnnnnnnnnnnnnnnnnnnnnnnnnnnnnnnnnnnnnnnnnnnnnnnnnnnnnnnnnnnnnnnnnnnnnnnnnnnnnnnnnnnnnnnnnnnnnnnnnnnnnnnnnnnnnnnnnnnnnnnnnnnnnnnnnnnnnnnnnnnnnnnnnnnnnnnnnnnnnnnnnnnnnnnnnnnnnnnnnnnnnnnnnnnnnnnnnnnnnnnnnnnnnnnnnnnnnnnnnnnnnnnnnnnnnnnnnnnnnnnnnnnnnnnnnnnnnnnnnnnnnnnnnnnnnnnnnnnnnnnnnnnnnnnnnnnnnnnnnnnnnnnnnnnnnnnnnnnnnnnnnnnnnnnnnnnnnnnnnnnnnnnnnnnnnnnnnnnnnnnnnnnnnnnnnnnnnnnnnnnnnnnnnnnnnnnnnnnnnnnnnnnnnnnnnnnnnnnnnnnnnnnnnnnnnnnnnnnnnnnnnnnnnnnnnnnnnnnnnnnnnnnnnnnnnnnnnnnnnnnnnnnnnnnnnnnnnnnnnnnnnnnnnnnnnnnnnnnnnnnnnnnnnnnnnnnnnnnnnnnnnnnnnnnnnnnnnnnnnnnnnnnnnnnnnnnnnnnnnnnnnnnnnnnnnnnnnnnnnnnnnnnnnnnnnnnnnnnnnnnnnnnnnnnnnnnnnnnnnnnnnnnnnnnnnnnnnnnnnnnnnnnnnnnnnnnnnnnnnnnnnnnnnnnnnnnnnnnnnnnnnnnnnnnnnnnnnnnnnnnnnnnnnnnnnnnnnnnnnnnnnnnnnnnnnnnnnnnnnnnnnnnnnnnnnnnnnnnnnnnnnnnnnnnnnnnnnnnnnnnnnnnnnnnnnnnnnnnnnnnnnnnnnnnnnnnnnnnnnnnnnnnnnnnnnnnnnnnnnnnnnnnnnnnnnnnnnnnnnnnnnnnnnnnnnnnnnnnnnnnnnnnnnnnnnnnnnnnnnnnnnnnnnnnnnnnnnnnnnnnnnnnnnnnnnnnnnnnnnnnnnnnnnnnnnnnnnnnnnnnnnnnnnnnnnnnnnnnnnnnnnnnnnnnnnnnnnnnnnnnnnnnnnnnnnnnnnnnnnnnnnnnnnnnnnnnnnnnnnnnnnnnnnnnnnnnnnnnnnnnnnnnnnnnnnnnnnnnnnnnnnnnnnnnnnnnnnnnnnnnnnnnnnnnnnnnnnnnnnnnnnnnnnnnnnnnnnnnnnnnnnnnnnnnnnnnnnnnnnnnnnnnnnnnnnnnnnnnnnnnnnnnnnnnnnnnnnnnnnnnnnnnnnnnnnnnnnnnnnnnnnnnnnnnnnnnnnnnnnnnnnnnnnnnnnnnnnnnnnnnnnnnnnnnnnnnnnnnnnnnnnnnnnnnnnnnnnnnnnnnnnnnnnnnnnnnnnnnnnnnnnnnnnnnnnnnnnnnnnnnnnnnnnnnnnnnnnnnnnnnnnnnnnnnnnnnnnnnnnnnnnnnnnnnnnnnnnnnnnnnnnnnnnnnnnnnnnnnnnnnnnnnnnnnnnnnnnnnnnnnnnnnnnnnnnnnnnnnnnnnnnnnnnnnnnnnnnnnnnnnnnnnnnnnnnnnnnnnnnnnnnnnnnnnnnnnnnnnnnnnnnnnnnnnnnnnnnnnnnnnnnnnnnnnnnnnnnnnnnnnnnnnnnnnnnnnnnnnnnnnnnnnnnnnnnnnnnnnnnnnnnnnnnnnnnnnnnnnnnnnnnnnnnnnnnnnnnnnnnnnnnnnnnnnnnnnnnnnnnnnnnnnnnnnnnnnnnnnnnnnnnnnnnnnnnnnnnnnnnnnnnnnnnnnnnnnnnnnnnnnnnnnnnnnnnnnnnnnnnnnnnnnnnnnnnnnnnnnnnnnnnnnnnnnnnnnnnnnnnnnnnnnnnnnnnnnnnnnnnnnnnnnnnnnnnnnnnnnnnnnnnnnnnnnnnnnnnnnnnnnnnnnnnnnnnnnnnnnnnnnnnnnnnnnnnnnnnnnnnnnnnnnnnnnnnnnnnnnnnnnnnnnnnnnnnnnnnnnnnnnnnnnnnnnnnnnnnnnnnnnnnnnnnnnnnnnnnnnnnnnnnnnnnnnnnnnnnnnnnnnnnnnnnnnnnnnnnnnnnnnnnnnnnnnnnnnnnnnnnnnnnnnnnnnnnnnnnnnnnnnnnnnnnnnnnnnnnnnnnnnnnnnnnnnnnnnnnnnnnnnnnnnnnnnnnnnnnnnnnnnnnnnnnnnnnnnnnnnnnnnnnnnnnnnnnnnnnnnnnnnnnnnnnnnnnnnnnnnnnnnnnnnnnnnnnnnnnnnnnnnnnnnnnnnnnnnnnnnnnnnnnnnnnnnnnnnnnnnnnnnnnnnnnnnnnnnnnnnnnnnnnnnnnnnnnnnnnnnnnnnnnnnnnnnnnnnnnnnnnnnnnnnnnnnnnnnnnnnnnnnnnnnnnnnnnnnnnnnnnnnnnnnnnnnnnnnnnnnnnnnnnnnnnnnnnnnnnnnnnnnnnnnnnnnnnnnnnnnnnnnnnnnnnnnnnnnnnnnnnnnnnnnnnnnnnnnnnnnnnnnnnnnnnnnnnnnnnnnnnnnnnnnnnnnnnnnnnnnnnnnnnnnnnnnnnnnnnnnnnnnnnnnnnnnnnnnnnnnnnnnnnnnnnnnnnnnnnnnnnnnnnnnnnnnnnnnnnnnnnnnnnnnnnnnnnnnnnnnnnnnnnnnnnnnnnnnnnnnnnnnnnnnnnnnnnnnnnnnnnnnnnnnnnnnnnnnnnnnnnnnnnnnnnnnnnnnnnnnnnnnnnnnnnnnnnnnnnnnnnnnnnnnnnnnnnnnnnnnnnnnnnnnnnnnnnnnnnnnnnnnnnnnnnnnnnnnnnnnnnnnnnnnnnnnnnnnnnnnnnnnnnnnnnnnnnnnnnnnnnnnnnnnnnnnnnnnnnnnnnnnnnnnnnnnnnnnnnnnnnnnnnnnnnnnnnnnnnnnnnnnnnnnnnnnnnnnnnnnnnnnnnnnnnnnnnnnnnnnnnnnnnnnnnnnnnnnnnnnnnnnnnnnnnnnnnnnnnnnnnnnnnnnnnnnnnnnnnnnnnnnnnnnnnnnnnnnnnnnnnnnnnnnnnnnnnnnnnnnnnnnnnnnnnnnnnnnnnnnnnnnnnnnnnnnnnnnnnnnnnnnnnnnnnnnnnnnnnnnnnnnnnnnnnnnnnnnnnnnnnnnnnnnnnnnnnnnnnnnnnnnnnnnnnnnnnnnnnnnnnnnnnnnnnnnnnnnnnnnnnnnnnnnnnnnnnnnnnnnnnnnnnnnnnnnnnnnnnnnnnnnnnnnnnnnnnnnnnnnnnnnnnnnnnnnnnnnnnnnnnnnnnnnnnnnnnnnnnnnnnnnnnnnnnnnnnnnnnnnnnnnnnnnnnnnnnnnnnnnnnnnnnnnnnnnnnnnnnnnnnnnnnnnnnnnnnnnnnnnnnnnnnnnnnnnnnnnnnnnnnnnnnnnnnnnnnnnnnnnnnnnnnnnnnnnnnnnnnnnnnnnnnnnnnnnnnnnnnnnnnnnnnnnnnnnnnnnnnnnnnnnnnnnnnnnnnnnnnnnnnnnnnnnnnnnnnnnnnnnnnnnnnnnnnnnnnnnnnnnnnnnnnnnnnnnnnnnnnnnnnnnnnnnnnnnnnnnnnnnnnnnnnnnnnnnnnnnnnnnnnnnnnnnnnnnnnnnnnnnnnnnnnnnnnnnnnnnnnnnnnnnnnnnnnnnnnnnnnnnnnnnnnnnnnnnnnnnnnnnnnnnnnnnnnnnnnnnnnnnnnnnnnnnnnnnnnnnnnnnnnnnnnnnnnnnnnnnnnnnnnnnnnnnnnnnnnnnnnnnnnnnnnnnnnnnnnnnnnnnnnnnnnnnnnnnnnnnnnnnnnnnnnnnnnnnnnnnnnnnnnnnnnnnnnnnnnnnnnnnnnnnnnnnnnnnnnnnnnnnnnnnnnnnnnnnnnnnnnnnnnnnnnnnnnnnnnnnnnnnnnnnnnnnnnnnnnnnnnnnnnnnnnnnnnnnnnnnnnnnnnnnnnnnnnnnnnnnnnnnnnnnnnnnnnnnnnnnnnnnnnnnnnnnnnnnnnnnnnnnnnnnnnnnnnnnnnnnnnnnnnnnnnnnnnnnnnnnnnnnnnnnnnnnnnnnnnnnnnnnnnnnnnnnnnnnnnnnnnnnnnnnnnnnnnnnnnnnnnnnnnnnnnnnnnnnnnnnnnnnnnnnnnnnnnnnnnnnnnnnnnnnnnnnnnnnnnnnnnnnnnnnnnnnnnnnnnnnnnnnnnnnnnnnnnnnnnnnnnnnnnnnnnnnnnnnnnnnnnnnnnnnnnnnnnnnnnnnnnnnnnnnnnnnnnnnnnnnnnnnnnnnnnnnnnnnnnnnnnnnnnnnnnnnnnnnnnnnnnnnnnnnnnnnnnnnnnnnnnnnnnnnnnnnnnnnnnnnnnnnnnnnnnnnnnnnnnnnnnnnnnnnnnnnnnnnnnnnnnnnnnnnnnnnnnnnnnnnnnnnnnnnnnnnnnnnnnnnnnnnnnnnnnnnnnnnnnnnnnnnnnnnnnnnnnnnnnnnnnnnnnnnnnnnnnnnnnnnnnnnnnnnnnnnnnnnnnnnnnnnnnnnnnnnnnnnnnnnnnnnnnnnnnnnnnnnnnnnnnnnnnnnnnnnnnnnnnnnnnnnnnnnnnnnnnnnnnnnnnnnnnnnnnnnnnnnnnnnnnnnnnnnnnnnnnnnnnnnnnnnnnnnnnnnnnnnnnnnnnnnnnnnnnnnnnnnnnnnnnnnnnnnnnnnnnnnnnnnnnnnnnnnnnnnnnnnnnnnnnnnnnnnnnnnnnnnnnnnnnnnnnnnnnnnnnnnnnnnnnnnnnnnnnnnnnnnnnnnnnnnnnnnnnnnnnnnnnnnnnnnnnnnnnnnnnnnnnnnnnnnnnnnnnnnnnnnnnnnnnnnnnnnnnnnnnnnnnnnnnnnnnnnnnnnnnnnnnnnnnnnnnnnnnnnnnnnnnnnnnnnnnnnnnnnnnnnnnnnnnnnnnnnnnnnnnnnnnnnnnnnnnnnnnnnnnnnnnnnnnnnnnnnnnnnnnnnnnnnnnnnnnnnnnnnnnnnnnnnnnnnnnnnnnnnnnnnnnnnnnnnnnnnnnnnnnnnnnnnnnnnnnnnnnnnnnnnnnnnnnnnnnnnnnnnnnnnnnnnnnnnnnnnnnnnnnnnnnnnnnnnnnnnnnnnnnnnnnnnnnnnnnnnnnnnnnnnnnnnnnnnnnnnnnnnnnnnnnnnnnnnnnnnnnnnnnnnnnnnnnnnnnnnnnnnnnnnnnnnnnnnnnnnnnnnnnnnnnnnnnnnnnnnnnnnnnnnnnnnnnnnnnnnnnnnnnnnnnnnnnnnnnnnnnnnnnnnnnnnnnnnnnnnnnnnnnnnnnnnnnnnnnnnnnnnnnnnnnnnnnnnnnnnnnnnnnnnnnnnnnnnnnnnnnnnnnnnnnnnnnnnnnnnnnnnnnnnnnnnnnnnnnnnnnnnnnnnnnnnnnnnnnnnnnnnnnnnnnnnnnnnnnnnnnnnnnnnnnnnnnnnnnnnnnnnnnnnnnnnnnnnnnnnnnnnnnnnnnnnnnnnnnnnnnnnnnnnnnnnnnnnnnnnnnnnnnnnnnnnnnnnnnnnnnnnnnnnnnnnnnnnnnnnnnnnnnnnnnnnnnnnnnnnnnnnnnnnnnnnnnnnnnnnnnnnnnnnnnnnnnnnnnnnnnnnnnnnnnnnnnnnnnnnnnnnnnnnnnnnnnnnnnnnnnnnnnnnnnnnnnnnnnnnnnnnnnnnnnnnnnnnnnnnnnnnnnnnnnnnnnnnnnnnnnnnnnnnnnnnnnnnnnnnnnnnnnnnnnnnnnnnnnnnnnnnnnnnnnnnnnnnnnnnnnnnnnnnnnnnnnnnnnnnnnnnnnnnnnnnnnnnnnnnnnnnnnnnnnnnnnnnnnnnnnnnnnnnnnnnnnnnnnnnnnnnnnnnnnnnnnnnnnnnnnnnnnnnnnnnnnnnnnnnnnnnnnnnnnnnnnnnnnnnnnnnnnnnnnnnnnnnnnnnnnnnnnnnnnnnnnnnnnnnnnnnnnnnnnnnnnnnnnnnnnnnnnnnnnnnnnnnnnnnnnnnnnnnnnnnnnnnnnnnnnnnnnnnnnnnnnnnnnnnnnnnnnnnnnnnnnnnnnnnnnnnnnnnnnnnnnnnnnnnnnnnnnnnnnnnnnnnnnnnnnnnnnnnnnnnnnnnnnnnnnnnnnnnnnnnnnnnnnnnnnnnnnnnnnnnnnnnnnnnnnnnnnnnnnnnnnnnnnnnnnnnnnnnnnnnnnnnnnnnnnnnnnnnnnnnnnnnnnnnnnnnnnnnnnnnnnnnnnnnnnnnnnnnnnnnnnnnnnnnnnnnnnnnnnnnnnnnnnnnnnnnnnnnnnnnnnnnnnnnnnnnnnnnnnnnnnnnnnnnnnnnnnnnnnnnnnnnnnnnnnnnnnnnnnnnnnnnnnnnnnnnnnnnnnnnnnnnnnnnnnnnnnnnnnnnnnnnnnnnnnnnnnnnnnnnnnnnnnnnnnnnnnnnnnnnnnnnnnnnnnnnnnnnnnnnnnnnnnnnnnnnnnnnnnnnnnnnnnnnnnnnnnnnnnnnnnnnnnnnnnnnnnnnnnnnnnnnnnnnnnnnnnnnnnnnnnnnnnnnnnnnnnnnnnnnnnnnnnnnnnnnnnnnnnnnnnnnnnnnnnnnnnnnnnnnnnnnnnnnnnnnnnnnnnnnnnnnnnnnnnnnnnnnnnnnnnnnnnnnnnnnnnnnnnnnnnnnnnnnnnnnnnnnnnnnnnnnnnnnnnnnnnnnnnnnnnnnnnnnnnnnnnnnnnnnnnnnnnnnnnnnnnnnnnnnnnnnnnnnnnnnnnnnnnnnnnnnnnnnnnnnnnnnnnnnnnnnnnnnnnnnnnnnnnnnnnnnnnnnnnnnnnnnnnnnnnnnnnnnnnnnnnnnnnnnnnnnnnnnnnnnnnnnnnnnnnnnnnnnnnnnnnnnnnnnnnnnnnnnnnnnnnnnnnnnnnnnnnnnnnnnnnnnnnnnnnnnnnnnnnnnnnnnnnnnnnnnnnnnnnnnnnnnnnnnnnnnnnnnnnnnnnnnnnnnnnnnnnnnnnnnnnnnnnnnnnnnnnnnnnnnnnnnnnnnnnnnnnnnnnnnnnnnnnnnnnnnnnnnnnnnnnnnnnnnnnnnnnnnnnnnnnnnnnnnnnnnnnnnnnnnnnnnnnnnnnnnnnnnnnnnnnnnnnnnnnnnnnnnnnnnnnnnnnnnnnnnnnnnnnnnnnnnnnnnnnnnnnnnnnnnnnnnnnnnnnnnnnnnnnnnnnnnnnnnnnnnnnnnnnnnnnnnnnnnnnnnnnnnnnnnnnnnnnnnnnnnnnnnnnnnnnnnnnnnnnnnnnnnnnnnnnnnnnnnnnnnnnnnnnnnnnnnnnnnnnnnnnnnnnnnnnnnnnnnnnnnnnnnnnnnnnnnnnnnnnnnnnnnnnnnnnnnnnnnnnnnnnnnnnnnnnnnnnnnnnnnnnnnnnnnnnnnnnnnnnnnnnnnnnnnnnnnnnnnnnnnnnnnnnnnnnnnnnnnnnnnnnnnnnnnnnnnnnnnnnnnnnnnnnnnnnnnnnnnnnnnnnnnnnnnnnnnnnnnnnnnnnnnnnnnnnnnnnnnnnnnnnnnnnnnnnnnnnnnnnnnnnnnnnnnnnnnnnnnnnnnnnnnnnnnnnnnnnnnnnnnnnnnnnnnnnnnnnnnnnnnnnnnnnnnnnnnnnnnnnnnnnnnnnnnnnnnnnnnnnnnnnnnnnnnnnnnnnnnnnnnnnnnnnnnnnnnnnnnnnnnnnnnnnnnnnnnnnnnnnnnnnnnnnnnnnnnnnnnnnnnnnnnnnnnnnnnnnnnnnnnnnnnnnnnnnnnnnnnnnnnnnnnnnnnnnnnnnnnnnnnnnnnnnnnnnnnnnnnnnnnnnnnnnnnnnnnnnnnnnnnnnnnnnnnnnnnnnnnnnnnnnnnnnnnnnnnnnnnnnnnnnnnnnnnnnnnnnnnnnnnnnnnnnnnnnnnnnnnnnnnnnnnnnnnnnnnnnnnnnnnnnnnnnnnnnnnnnnnnnnnnnnnnnnnnnnnnnnnnnnnnnnnnnnnnnnnnnnnnnnnnnnnnnnnnnnnnnnnnnnnnnnnnnnnnnnnnnnnnnnnnnnnnnnnnnnnnnnnnnnnnnnnnnnnnnnnnnnnnnnnnnnnnnnnnnnnnnnnnnnnnnnnnnnnnnnnnnnnnnnnnnnnnnnnnnnnnnnnnnnnnnnnnnnnnnnnnnnnnnnnnnnnnnnnnnnnnnnnnnnnnnnnnnnnnnnnnnnnnnnnnnnnnnnnnnnnnnnnnnnnnnnnnnnnnnnnnnnnnnnnnnnnnnnnnnnnnnnnnnnnnnnnnnnnnnnnnnnnnnnnnnnnnnnnnnnnnnnnnnnnnnnnnnnnnnnnnnnnnnnnnnnnnnnnnnnnnnnnnnnnnnnnnnnnnnnnnnnnnnnnnnnnnnnnnnnnnnnnnnnnnnnnnnnnnnnnnnnnnnnnnnnnnnnnnnnnnnnnnnnnnnnnnnnnnnnnnnnnnnnnnnnnnnnnnnnnnnnnnnnnnnnnnnnnnnnnnnnnnnnnnnnnnnnnnnnnnnnnnnnnnnnnnnnnnnnnnnnnnnnnnnnnnnnnnnnnnnnnnnnnnnnnnnnnnnnnnnnnnnnnnnnnnnnnnnnnnnnnnnnnnnnnnnnnnnnnnnnnnnnnnnnnnnnnnnnnnnnnnnnnnnnnnnnnnnnnnnnnnnnnnnnnnnnnnnnnnnnnnnnnnnnnnnnnnnnnnnnnnnnnnnnnnnnnnnnnnnnnnnnnnnnnnnnnnnnnnnnnnnnnnnnnnnnnnnnnnnnnnnnnnnnnnnnnnnnnnnnnnnnnnnnnnnnnnnnnnnnnnnnnnnnnnnnnnnnnnnnnnnnnnnnnnnnnnnnnnnnnnnnnnnnnnnnnnnnnnnnnnnnnnnnnnnnnnnnnnnnnnnnnnnnnnnnnnnnnnnnnnnnnnnnnnnnnnnnnnnnnnnnnnnnnnnnnnnnnnnnnnnnnnnnnnnnnnnnnnnnnnnnnnnnnnnnnnnnnnnnnnnnnnnnnnnnnnnnnnnnnnnnnnnnnnnnnnnnnnnnnnnnnnnnnnnnnnnnnnnnnnnnnnnnnnnnnnnnnnnnnnnnnnnnnnnnnnnnnnnnnnnnnnnnnnnnnnnnnnnnnnnnnnnnnnnnnnnnnnnnnnnnnnnnnnnnnnnnnnnnnnnnnnnnnnnnnnnnnnnnnnnnnnnnnnnnnnnnnnnnnnnnnnnnnnnnnnnnnnnnnnnnnnnnnnnnnnnnnnnnnnnnnnnnnnnnnnnnnnnnnnnnnnnnnnnnnnnnnnnnnnnnnnnnnnnnnnnnnnnnnnnnnnnnnnnnnnnnnnnnnnnnnnnnnnnnnnnnnnnnnnnnnnnnnnnnnnnnnnnnnnnnnnnnnnnnnnnnnnnnnnnnnnnnnnnnnnnnnnnnnnnnnnnnnnnnnnnnnnnnnnnnnnnnnnnnnnnnnnnnnnnnnnnnnnnnnnnnnnnnnnnnnnnnnnnnnnnnnnnnnnnnnnnnnnnnnnnnnnnnnnnnnnnnnnnnnnnnnnnnnnnnnnnnnnnnnnnnnnnnnnnnnnnnnnnnnnnnnnnnnnnnnnnnnnnnnnnnnnnnnnnnnnnnnnnnnnnnnnnnnnnnnnnnnnnnnnnnnnnnnnnnnnnnnnnnnnnnnnnnnnnnnnnnnnnnnnnnnnnnnnnnnnnnnnnnnnnnnnnnnnnnnnnnnnnnnnnnnnnnnnnnnnnnnnnnnnnnnnnnnnnnnnnnnnnnnnnnnnnnnnnnnnnnnnnnnnnnnnnnnnnnnnnnnnnnnnnnnnnnnnnnnnnnnnnnnnnnnnnnnnnnnnnnnnnnnnnnnnnnnnnnnnnnnnnnnnnnnnnnnnnnnnnnnnnnnnnnnnnnnnnnnnnnnnnnnnnnnnnnnnnnnnnnnnnnnnnnnnnnnnnnnnnnnnnnnnnnnnnnnnnnnnnnnnnnnnnnnnnnnnnnnnnnnnnnnnnnnnnnnnnnnnnnnnnnnnnnnnnnnnnnnnnnnnnnnnnnnnnnnnnnnnnnnnnnnnnnnnnnnnnnnnnnnnnnnnnnnnnnnnnnnnnnnnnnnnnnnnnnnnnnnnnnnnnnnnnnnnnnnnnnnnnnnnnnnnnnnnnnnnnnnnnnnnnnnnnnnnnnnnnnnnnnnnnnnnnnnnnnnnnnnnnnnnnnnnnnnnnnnnnnnnnnnnnnnnnnnnnnnnnnnnnnnnnnnnnnnnnnnnnnnnnnnnnnnnnnnnnnnnnnnnnnnnnnnnnnnnnnnnnnnnnnnnnnnnnnnnnnnnnnnnnnnnnnnnnnnnnnnnnnnnnnnnnnnnnnnnnnnnnnnnnnnnnnnnnnnnnnnnnnnnnnnnnnnnnnnnnnnnnnnnnnnnnnnnnnnnnnnnnnnnnnnnnnnnnnnnnnnnnnnnnnnnnnnnnnnnnnnnnnnnnnnnnnnnnnnnnnnnnnnnnnnnnnnnnnnnnnnnnnnnnnnnnnnnnnnnnnnnnnnnnnnnnnnnnnnnnnnnnnnnnnnnnnnnnnnnnnnnnnnnnnnnnnnnnnnnnnnnnnnnnnnnnnnnnnnnnnnnnnnnnnnnnnnnnnnnnnnnnnnnnnnnnnnnnnnnnnnnnnnnnnnnnnnnnnnnnnnnnnnnnnnnnnnnnnnnnnnnnnnnnnnnnnnnnnnnnnnnnnnnnnnnnnnnnnnnnnnnnnnnnnnnnnnnnnnnnnnnnnnnnnnnnnnnnnnnnnnnnnnnnnnnnnnnnnnnnnnnnnnnnnnnnnnnnnnnnnnnnnnnnnnnnnnnnnnnnnnnnnnnnnnnnnnnnnnnnnnnnnnnnnnnnnnnnnnnnnnnnnnnnnnnnnnnnnnnnnnnnnnnnnnnnnnnnnnnnnnnnnnnnnnnnnnnnnnnnnnnnnnnnnnnnnnnnnnnnnnnnnnnnnnnnnnnnnnnnnnnnnnnnnnnnnnnnnnnnnnnnnnnnnnnnnnnnnnnnnnnnnnnnnnnnnnnnnnnnnnnnnnnnnnnnnnnnnnnnnnnnnnnnnnnnnnnnnnnnnnnnnnnnnnnnnnnnnnnnnnnnnnnnnnnnnnnnnnnnnnnnnnnnnnnnnnnnnnnnnnnnnnnnnnnnnnnnnnnnnnnnnnnnnnnnnnnnnnnnnnnnnnnnnnnnnnnnnnnnnnnnnnnnnnnnnnnnnnnnnnnnnnnnnnnnnnnnnnnnnnnnnnnnnnnnnnnnnnnnnnnnnnnnnnnnnnnnnnnnnnnnnnnnnnnnnnnnnnnnnnnnnnnnnnnnnnnnnnnnnnnnnnnnnnnnnnnnnnnnnnnnnnnnnnnnnnnnnnnnnnnnnnnnnnnnnnnnnnnnnnnnnnnnnnnnnnnnnnnnnnnnnnnnnnnnnnnnnnnnnnnnnnnnnnnnnnnnnnnnnnnnnnnnnnnnnnnnnnnnnnnnnnnnnnnnnnnnnnnnnnnnnnnnnnnnnnnnnnnnnnnnnnnnnnnnnnnnnnnnnnnnnnnnnnnnnnnnnnnnnnnnnnnnnnnnnnnnnnnnnnnnnnnnnnnnnnnnnnnnnnnnnnnnnnnnnnnnnnnnnnnnnnnnnnnnnnnnnnnnnnnnnnnnnnnnnnnnnnnnnnnnnnnnnnnnnnnnnnnnnnnnnnnnnnnnnnnnnnnnnnnnnnnnnnnnnnnnnnnnnnnnnnnnnnnnnnnnnnnnnnnnnnnnnnnnnnnnnnnnnnnnnnnnnnnnnnnnnnnnnnnnnnnnnnnnnnnnnnnnnnnnnnnnnnnnnnnnnnnnnnnnnnnnnnnnnnnnnnnnnnnnnnnnnnnnnnnnnnnnnnnnnnnnnnnnnnnnnnnnnnnnnnnnnnnnnnnnnnnnnnnnnnnnnnnnnnnnnnnnnnnnnnnnnnnnnnnnnnnnnnnnnnnnnnnnnnnnnnnnnnnnnnnnnnnnnnnnnnnnnnnnnnnnnnnnnnnnnnnnnnnnnnnnnnnnnnnnnnnnnnnnnnnnnnnnnnnnnnnnnnnnnnnnnnnnnnnnnnnnnnnnnnnnnnnnnnnnnnnnnnnnnnnnnnnnnnnnnnnnnnnnnnnnnnnnnnnnnnnnnnnnnnnnnnnnnnnnnnnnnnnnnnnnnnnnnnnnnnnnnnnnnnnnnnnnnnnnnnnnnnnnnnnnnnnnnnnnnnnnnnnnnnnnnnnnnnnnnnnnnnnnnnnnnnnnnnnnnnnnnnnnnnnnnnnnnnnnnnnnnnnnnnnnnnnnnnnnnnnnnnnnnnnnnnnnnnnnnnnnnnnnnnnnnnnnnnnnnnnnnnnnnnnnnnnnnnnnnnnnnnnnnnnnnnnnnnnnnnnnnnnnnnnnnnnnnnnnnnnnnnnnnnnnnnnnnnnnnnnnnnnnnnnnnnnnnnnnnnnnnnnnnnnnnnnnnnnnnnnnnnnnnnnnnnnnnnnnnnnnnnnnnnnnnnnnnnnnnnnnnnnnnnnnnnnnnnnnnnnnnnnnnnnnnnnnnnnnnnnnnnnnnnnnnnnnnnnnnnnnnnnnnnnnnnnnnnnnnnnnnnnnnnnnnnnnnnnnnnnnnnnnnnnnnnnnnnnnnnnnnnnnnnnnnnnnnnnnnnnnnnnnnnnnnnnnnnnnnnnnnnnnnnnnnnnnnnnnnnnnnnnnnnnnnnnnnnnnnnnnnnnnnnnnnnnnnnnnnnnnnnnnnnnnnnnnnnnnnnnnnnnnnnnnnnnnnnnnnnnnnnnnnnnnnnnnnnnnnnnnnnnnnnnnnnnnnnnnnnnnnnnnnnnnnnnnnnnnnnnnnnnnnnnnnnnnnnnnnnnnnnnnnnnnnnnnnnnnnnnnnnnnnnnnnnnnnnnnnnnnnnnnnnnnnnnnnnnnnnnnnnnnnnnnnnnnnnnnnnnnnnnnnnnnnnnnnnnnnnnnnnnnnnnnnnnnnnnnnnnnnnnnnnnnnnnnnnnnnnnnnnnnnnnnnnnnnnnnnnnnnnnnnnnnnnnnnnnnnnnnnnnnnnnnnnnnnnnnnnnnnnnnnnnnnnnnnnnnnnnnnnnnnnnnnnnnnnnnnnnnnnnnnnnnnnnnnnnnnnnnnnnnnnnnnnnnnnnnnnnnnnnnnnnnnnnnnnnnnnnnnnnnnnnnnnnnnnnnnnnnnnnnnnnnnnnnnnnnnnnnnnnnnnnnnnnnnnnnnnnnnnnnnnnnnnnnnnnnnnnnnnnnnnnnnnnnnnnnnnnnnnnnnnnnnnnnnnnnnnnnnnnnnnnnnnnnnnnnnnnnnnnnnnnnnnnnnnnnnnnnnnnnnnnnnnnnnnnnnnnnnnnnnnnnnnnnnnnnnnnnnnnnnnnnnnnnnnnnnnnnnnnnnnnnnnnnnnnnnnnnnnnnnnnnnnnnnnnnnnnnnnnnnnnnnnnnnnnnnnnnnnnnnnnnnnnnnnnnnnnnnnnnnnnnnnnnnnnnnnnnnnnnnnnnnnnnnnnnnnnnnnnnnnnnnnnnnnnnnnnnnnnnnnnnnnnnnnnnnnnnnnnnnnnnnnnnnnnnnnnnnnnnnnnnnnnnnnnnnnnnnnnnnnnnnnnnnnnnnnnnnnnnnnnnnnnnnnnnnnnnnnnnnnnnnnnnnnnnnnnnnnnnnnnnnnnnnnnnnnnnnnnnnnnnnnnnnnnnnnnnnnnnnnnnnnnnnnnnnnnnnnnnnnnnnnnnnnnnnnnnnnnnnnnnnnnnnnnnnnnnnnnnnnnnnnnnnnnnnnnnnnnnnnnnnnnnnnnnnnnnnnnnnnnnnnnnnnnnnnnnnnnnnnnnnnnnnnnnnnnnnnnnnnnnnnnnnnnnnnnnnnnnnnnnnnnnnnnnnnnnnnnnnnnnnnnnnnnnnnnnnnnnnnnnnnnnnnnnnnnnnnnnnnnnnnnnnnnnnnnnnnnnnnnnnnnnnnnnnnnnnnnnnnnnnnnnnnnnnnnnnnnnnnnnnnnnnnnnnnnnnnnnnnnnnnnnnnnnnnnnnnnnnnnnnnnnnnnnnnnnnnnnnnnnnnnnnnnnnnnnnnnnnnnnnnnnnnnnnnnnnnnnnnnnnnnnnnnnnnnnnnnnnnnnnnnnnnnnnnnnnnnnnnnnnnnnnnnnnnnnnnnnnnnnnnnnnnnnnnnnnnnnnnnnnnnnnnnnnnnnnnnnnnnnnnnnnnnnnnnnnnnnnnnnnnnnnnnnnnnnnnnnnnnnnnnnnnnnnnnnnnnnnnnnnnnnnnnnnnnnnnnnnnnnnnnnnnnnnnnnnnnnnnnnnnnnnnnnnnnnnnnnnnnnnnnnnnnnnnnnnnnnnnnnnnnnnnnnnnnnnnnnnnnnnnnnnnnnnnnnnnnnnnnnnnnnnnnnnnnnnnnnnnnnnnnnnnnnnnnnnnnnnnnnnnnnnnnnnnnnnnnnnnnnnnnnnnnnnnnnnnnnnnnnnnnnnnnnnnnnnnnnnnnnnnnnnnnnnnnnnnnnnnnnnnnnnnnnnnnnnnnnnnnnnnnnnnnnnnnnnnnnnnnnnnnnnnnnnnnnnnnnnnnnnnnnnnnnnnnnnnnnnnnnnnnnnnnnnnnnnnnnnnnnnnnnnnnnnnnnnnnnnnnnnnnnnnnnnnnnnnnnnnnnnnnnnnnnnnnnnnnnnnnnnnnnnnnnnnnnnnnnnnnnnnnnnnnnnnnnnnnnnnnnnnnnnnnnnnnnnnnnnnnnnnnnnnnnnnnnnnnnnnnnnnnnnnnnnnnnnnnnnnnnnnnnnnnnnnnnnnnnnnnnnnnnnnnnnnnnnnnnnnnnnnnnnnnnnnnnnnnnnnnnnnnnnnnnnnnnnnnnnnnnnnnnnnnnnnnnnnnnnnnnnnnnnnnnnnnnnnnnnnnnnnnnnnnnnnnnnnnnnnnnnnnnnnnnnnnnnnnnnnnnnnnnnnnnnnnnnnnnnnnnnnnnnnnnnnnnnnnnnnnnnnnnnnnnnnnnnnnnnnnnnnnnnnnnnnnnnnnnnnnnnnnnnnnnnnnnnnnnnnnnnnnnnnnnnnnnnnnnnnnnnnnnnnnnnnnnnnnnnnnnnnnnnnnnnnnnnnnnnnnnnnnnnnnnnnnnnnnnnnnnnnnnnnnnnnnnnnnnnnnnnnnnnnnnnnnnnnnnnnnnnnnnnnnnnnnnnnnnnnnnnnnnnnnnnnnnnnnnnnnnnnnnnnnnnnnnnnnnnnnnnnnnnnnnnnnnnnnnnnnnnnnnnnnnnnnnnnnnnnnnnnnnctcaatccattcgtagctggggcagtccggataggcggtgtccgagacgtcgtagatgaaatagccgtattcgtcgggacccaggggcgtgttttgcgccactgtgccgatgggcagtgaaaaatgggcgatctgctcgaatccgtcggcattgtagagcctgagcctgaatgggatcatcatcccgggtatcagcaggggctgggcgaaaaggccatagccttcgatggaagaggcattcatgcctgccgggatgctgccgaaataggagaggttgtccgttacctccaccaggtcgttgagggcggtgagttcaccgtaaatatcgctggcgccaaagacggaggagtttttcaccgcgagggtgaggatgccgttttcggaggggtccagcacgttgtcgccgccggcgctcacgctgtggttgatcacgctgaggtcggcattgaagccgcccaggtaaaacaacacctgatagctgttggcggcgctgtcggtgagttccagggtgaagcggcaattgtggaaagcggggatgttccggtcaaagctgatgaggaaggggacgctgttctgggcagtctgttccgccgtgatggcgggccaggcgctgttggcctgggtgacggtcaccaactgatcggccgtgctgagcacaccggtgatgccgtcgatggcggcggtggtggtgttgtggagctccacgctcagggcgatggtctccccggcgttgatgaagctgtcgccattgccggaggagccggaactgccgtcatccgcgatggttttggagagatagaccaaagagcctgccgcgtcgatcagcagggtctgctgggaaggcttgtgatcgtgtttggaggcggtgatcagcaggtcgccggtcacgaaattgggcaccaggagggtaaccattccgctttcgtccgtgaaacccttggccaccacatcgccataaccgtcgttatagatggtaacgctcaccccttccacgggggtcaaagatggatcggaaacctggatgtccacaaaaggagtcccgcgggggatggagtccggggctgatatgaccaggctttggggtatgccaatgaaggtttccacggtgggatcgcccatcaggttgcaccagtgggcagaactgttggcatggctggtattggtctggccgtacatgttgtgcagatagaggcggccgttgagcagggcctcgcccatgctacgcatcccgtagaggaaaatgccgtcgaagatgccggtcgcgagggcgttgttcaacatcgttttggtggcgatggtggccatgccgatggcggtgagggcgcctctgggaacggcttcggtgcccaggcggatgaaggcttcagaggtggtttcctgggaggcataactgccggttccgcaggtcagcataacggcgtgcggcagccggggaccgttattcagggaattgctggggctccagccgctcatgttgatatagccgcggtagttgaaaaagctcacgccctggttgatgccgttgttgatggtggaggggaaaccgccggtgtagttttcgatgtaagtgtaatcgggattgacttcatggctcatctcgtggatgtactggctattgtaaaccgtggatatgccggagtaggagcggtcgccgatgagcagcatgcggttcagccaggcggcagcatcgggagcgttgtttatgttcttttcgtaggtgtaaaccttgttcaggatggtgatgagctgggtaaggtcctgcacggaaatgcggccgatgaacgcgtcgcccaggaggtcgctgccagccaggtgggtataaggataatcgccttcaccgttgcggccgctgtaggactcaaaccaggccgggatcgggtagttgccgctggtatcgcccagcaggataatgaaatccgggcgggtttccggattgttgtactggctttggatatagttcttgatgctggtggtgctggccccgccggtctgggaggtgctcaccacgttcacggcatagcccttttggcgtttccaggtggcaaattcattcagtttggtcaggaacacagggtcgctgttgttgccgtggatcagcaggatgcgggcgtgggaaggcgcggtctcaagattgcggtaatcggcgaaattggcgatttgggcctcgtatatcttcctgaaagcctggctgtagcccgtataatcgggcagttcgttgaggccgggttcggcagtgaaatccaaggttacctcgatatccctgaaagtggccaggcgcctggtgacgggatcgtattggcagggataaacgttgatctgaaccacgcggaaatcacgcaggatggcgggttctgaggccgttgccaggctggaggggaaaagcccgccggaagggaccgccacgccgtcccagccttccctgcatattttgggctcgtcaagctggctgtattccaccccgccgtagctataggaaagggtgaagctgccccggggcgggatggccaccatggtgctgaacacgggaagttccggctggccgggttcgcaggtgccaagcgcgccttccatgcggatttcccggacgctttggcctccgtcttcgccggcggaaaagctgagggcgggcacggaaaccgcgagtttaagctggctgccggtagaccgcgcgaccgagaacgggcttgctgtttcggcgttcagagcggcaaggcagagcagcgccaacatggtgagtgacaggatccttttcattgtatcatccttgtatcgtcaaatcaaaaacctggagttgaggctccaggttatggttgcgttttttgcataaaggttttcttttgctttgttcatttgatggcatagatcaggacaccctggtcccgggaagccacgaccagttttcccttgttgaatttggcgttgttggtgtagccggcggatcggaggttctgcttcaggatgggactgctgggattgctgatgtcaaagaggtagatgccgccactgcctgagctaacggcggccagactgcccataatgtcgatgctggtggcgtagccggtggtgtcgaaggtatgcaccagcaagggttcggcgggcgcaccgatgttcaccacgttcaggccgccctggcggctggcgacgtaggcataattccccgcgaccttcacctgcagggcctggccggggagcgcgatttcgctcaccttctctttggtggcgcggtcgtaaatgaccaatccgcgctgttcggcggccacatagatgtagttgtccgtggcgtccattcccgaagcggtggcgggagtggtgatcacgtaatctgtgcccaggtagagcccgccgttgtagcgaacgtacatcaggttgcgtccggctccgaaaaagccctggacgatattgtcatccacaggggcctcaatggcgctgaaagaaatcgattgcaggccgtccgtgccgccggtgatggaatctatcagcctgagcgaatcgggatcggagtaatcgacaatacggattttgtccgcgctcacatactcgcccagaaagagcagtttgtgctcgccgactgccgagatattgcggatgttcaccagggtggcgtccgcgctggggggatagatatccgtccaccaacgctgagagtaatccgtggcatcgatcacggaaatgccgccctggtcctgggccacaaaaatgctctcgttgtcaaaagacaggtccacgggattgccgaccacctgcacctgcttgagcaggctgaggacgtcctggtcctcccaggcgggattgcgccgcgagcatccgcaaaggatgagcagcaccgccgcgaacagtatgatctgctttttcaccatgttcaaatcctcccaggggaataaaatttatgattatgcatatagtagatgcaagaatcgttccgaatctgccacaataactgcggattcctttcccaaagcctttttcgcccacggacaggccgtttgccccttcccactaacatcccgtaaacctccccttaaattcccgcccggccaatgggaactcagcgggaagtattttagatgtgtatgggatggggcaaatggggcttctattgatagtgggtatcaaaatgggaggaagtccacaaattgcgcgaattcatacgaattgcttttccagttacgctaccaactgtggtagataacctaaaataaaggacttacttcccaatcgggcaagtaatccatatgtttggagcccgaaggtcccagaacgattggccgacggggacatcgaccttcctgacgctggcgtcgagcgaggcacgagcatggacgccagcaacatctcctgtagtccatactcgcaagctcgctgcactccaggctcaccaacgttggaaggcaaattcacaaattcacaaccggtaaatatggcttgtgaatttgcaacctgctgatagacgggtaattatgaggctaattcacaaaaaaggggtctcttatacatccgcggaagccgattgtaaacaggatatgatgtatccacgctaccagtctataatacatatagaaatagtatatataatatataatagtattatatattattatatattgatattatatcatctctaccttcccttcatctcttgtttgcggcatgagccactgcaaaccggcattctcccctggtccggctggatataagagataagcgtattttgtgaatttgtcccccaactcactgtgccacaataacacacggattcacaagccatatttaccggttgtgaatttgtgaatctgaccttgccggccttaaggaagtttgaaattagagccctattttggacttgacaaattattccttggtaaatttggtgtataatagctatggggcataatgatgttagcctgtggaacggcctctgtaaaggatcaacaagctatcaaccctccccatgcgacaggagcttcaatgtattataatttgacagacaaaccctggatcagtgtgctacagcttgacgggcattctgccaggctcggcctggctgaggtcctgcgaaaagcacacacactgcgtttggcttacggcaatccgatggaccgcatgtccgttttccgtttcctcctcgccctgggctattggtgttttgccaatacaaaacaagcgccggtatcagataagccactgcctcaggcatggacggactggcttgaacaaaaccaagaatatttcgaattgttcggtgatggccccagattctaccaatccccaggaacatccagaatacgccccagcacggaccttatccacgagcttcccacggcaaacaatttctggcacttccgccatgtgaccgatttcatcgatggcatttgcccagcttgctgcgttaccggtctgctgcgcctgccactctttaccaccgtaggcggcagcggaatcggagccggcatcaacagaactcctcccttctatgccatctggcagggtgatagtctgtcggaatcgatattcctgaattgggaacccacttcccggttgggtgttcctgcctggctgaacccgtttggatcccaaaacgagaaggatgtagccttgctgactggcctcacctggctgccccgcaaggtattcctgcttggcccggtgtcagacggagcaaaatgcagcgcctgcggagaagagcatgagcctctggtctatgcctgcaacaatgaggcggtgaaagtgcctccgaaccttgtctggaacgaccctcacgcgatttaccgggatgacaataatggcctgactgcccaggtggctctgatgtccggggacaaatacactttcgctaacagggattggcataaacccctggtcggcttcttacgggcgaaaggcatgtctcggaccgccacgctgtttttagtgggcttcacaagcgttcaagccaaatgtgtggacgtttgggaaaagaccattgccctatccggaaaaacaagctccgaggaactgctggaccagatatccgaaagagcctactccctgcacaggatgaggaaacaagaccgccggggcgattacaaggaatccgtgggaatcaccgccgtggcggacatcatcccgcacgtagagcatcgggttgacgtccattcgggcgagatggtggaaaacagcggcaatgtctggcaggaagcggatgaagattacggattcttcatgaagcgttttgccgtttctctagtgccggaaattacggttgccgccaagcttgaacgagaacaactggctcggcgcaagccctggcccctaaaaccaaaatcaattaaaaaaccttcatccggaggcgataatgaatgagagcaccgtgaaatttgttcggagcctgggcgaactcaaagagggcgacctgggcttgctcagaaagctcaggggtcgccgtctggatgaatccctgccgggtttcgacctgttttccggcctgtggtggccactccgcagtataagccccaaaacccccaggcggaaggtggtctggctagtcaccaagcttttcgcggaattccgctttgagcaaaagaaaggcgccagcctgccttggctcatgggcagaatatgccgtggacttaaagaagaaaaagagttcccacgtgttttagccaggttcgaccgcttgctcacgctcgagttgaaccaactggaggaaccgctggcgcaagtgctcgcgattttaaaaagacatgacattgccagtctggactgggttgccctcatcgatgacctctccgcttgggaacgggaatcaaacagagcgatatggtcagacacatttatttcagcatttaataatcagcaaggaggaatcaaatgttgattgaaatacacatgatccaaaaccacagcccggccaacctgaaccgggacgacctgggcgcgcccaagacctgttatttcggtggggtgttgcggtcccgcatctccagccagtgcctaaagcggagcatcaggatgagcgatgaattcaaaaacttgctcgggggtatccgtacccgtcggttggccgagttgattacaaaagctacaggacaggactgcaggaatcaggcagaggaagttctgaacaaagccggtttgaaacacgaaaacggacatagtaagatgctggtgttcatgacccggaacaagatcgatgcccttgctcaaattgtcaccagcgaaggcctgagtgttgcagagaaagccaagaaagcggcagatgtaatatcgggggcaatacattcccctgacatcgctctgtgcggaagaatgctcgagcccgataccaaggacaagaacacagacaaggtcaagtgggaaaataccactgttgaagcagccctgcaggtgtcgcacgccatttcaacccacatcgcccgcccagaaatagattactatgtagcagctgatgacgagcctggcgacgacacaggtgctggattcatagacgaggcgatgtttgcttcggcctgtttctacaaatattactcaattgattggaataccttgataatcaacctccagggtaatgaaaagttggcagctcatactgtcggagcctttatccaggccgctgcactcactaatcccagcggaaagcagaacagctttgccgcacataaccttcccgatggaatattggtagaaataaaagagacacctgtcagctatgcaaatgcctttgtgcgaccggtgggaatcgttaaggattctgacttggtagaacaaagcattggccaactggccaactatgtgaaggatataagtgccggtttcttccctggacagatgaaaggcaacgctctgtggttctcgcccaatggacgttatcccctaaagcctcaacagggcacgctggacataaagccagtttgcaacctgctagaacttgttcgcgaagcagttgagatgttgggttttgaatgggatgatgtaaaaaacgagaaagtagagagttgaaatgtcttctccgcctaataccctgttcctgagattggaggctccccttcaggcctggggaagcaatgaggccaaattcgccgtgcgcaggacagccgacgcgcccaccaaatccggagtggcaggcctgctctgcgctgccctgggaatcagccgggccgaagccggacagtattggctgggtgaaattgccaaattgcgcatgggggtgcggatagaccgcccgggcatccgctggtgggattaccatactgtgggagcggagcagaagctgcgcatttctgacctgaaaatgcccaacggcctagttctggttggcactgccctggccaaaaacctgggcgcggacaagatcaaatccaaacccggggctttgctctcccgacgcgagtatttggctgatgccagcttcctggttgcgctccagggtgaaccggatatcgtggcacaactggctgaagcgctgaaaaaaccagtctggacgctttatctggggcgaaaatcctgtcccccctcccgtccggtggatgaacacccgccagggttttatgccagtctgaaagaggctttgcggtcgatcccggcgcaactgagggaaaaaggcgaaccgatacctgacagtgttccctgtgtgctcgactgggttccggcccatgatgacgtgcacgctccgccgaacgccgaagcgcattacgacgtgccggtgtcctttgagcctccccaccacttgccccggctggtgatccgctgtaacctgccattggaccgcaacttcgaggcagagaccgtgctttccggcaaagcctggcaaccgccccgcaaccgggcaaattacgacaatcctgaatacaaaagggtccgcgctgagcgtttggtgatggacaatgccgcctgcatgttctgcaaggcacccgccactactgtgcagcacgtgaattaccgacgcgccggaggcagcgagaagccggaggacttgcgcgccctctgccgcctctgccacgatgcctgcaccatgctggaatatggcagcggcatgaccatggaccgcatagatccctgtgaccccgcctggcgtgagcgcatcttggccaaacgcgaggaaataatcaaattccgctcgctggagcagcgcaggcgcaaactcgatccgaaggaggagaacggatgatgtatctatcccaactgctcatcgacacaggcggcaaccctgaccggccaaggcccgggcgcttgtggctgaacaatatctataatgtccaccggcggctcagcatggctttccccatgcgcaagcgcaaggaaggagacccgaggtttctgcagccctttgaccccgcagattttgaaaagcgccagttcctctttcgggtggacaacaacaccgatggagaaaatcaaagggcgatggttttggtgcagtcgtccctgccgccggattgggactgggctttccagaatgccacgggatttttggcagcccctccccaggttaaggaatacgatccccagttctcagcaggtcagcggctgcgcttccgcatcctcgtgaatgccagtgtcaaacgcaaaatcgacgagttgcgggaaggacccggaggaaaggaaaaaacgggaagggttctgcacaaacgggtcgcccttacctgggacacaaattccaacccaaaggatgcggtggcgcaatggtttgccgccaaggctggcagactgggcttcacgcccggggagaccgaactggtaagcctgggctgggtatacggttccaaaccggagccccggggaaattcgccccggcgtgagaacgaataccgtcccctgagataccgttccgccctgctggaaggttatctgacagtggatgatgcctttctgttccgggaagccttggaaaaaggtatcggcagcgccaaaggaatgggcttcggcctcctttccgtggttccggcaagtgatgcgtaacagagaccttcacctaatgccaaaaatgcgggaccgcttcacctatctctatgtggagcatgccaaaatagacaaagaacaacaggcaatcgcctttcacgatgccatgggctccactcctgttccctgcgctggactggccctgctgatgctggggccaggcgtatccatcacccatgcggccatccttgttttagcagaatgcggctgtttggtggcttgggtgggggaacagggagtccgcttttactcatccgggacagggaccacccgtagttccgccaaccttatgcgtcaggctgccgcctggtcaaatcgagatacgcatctgcggatagttcgcagaatgtatgaattgaggttcaaggaaaaactggacccaaccctctctcttgaacagataaggggaaaagagggagcgagagtacgggatacctatttcagactttcaaaagaattcgatgtgcccatgagtgcgaggaattacgacaggagcaactggaataaaaccgaccccatcaacagagccctgtccgttgccaattcctgtctctatggcatctgccacgccgcgatagtggccgctggctattcacctgccctgggtttcgttcatactggcaaacaactgtcatttgtttatgacattgccgatctttataaaatggaaacctccgtgcccgcggctttcatagccacagccgcaggggtcgataacctggacagaaggacacgcattgcctgccgtgaccagttctatcaatttggtctgctaaagaagatagtggccgacattcacgcccttttcggtattctggaaacttcggacgatgagccagaccttgctgatgtcgatccagccgtgccaggcgggctttggaacccagatgataaagtgagccccggcggcttgtcatggggtctggatgatcctggaggccatgatgatggttctggtgcttgaaaaagttccctctggcctgagaggagaaattacacgctggctcctcgaaatcaaggctggagtatttgtcggtcaggtatcggccatgataagggaaaagctgtgggacaaggccaggtctggttgtgccggtggaacttgtatcatgatttacagcaagcattgcgaacaaggctttggaattgagttttggggtgccgcggaaaggatagtgacagaatgggaaggattgaaattgatgaccaagcatccgtgatccatacttgaagcctgttcaatggcctcaaagcgtctactttcgaagtgtgttccccacctgcgtgggggtgaaccgcggcattatcaagcaggcagtccaccccgccggtgttccccacctgcgtgggggtgaaccgagcatctccaaagtcagcgccgccgccttga

SEQ ID NO: 1027 - DNA, 103712 bp, Artificial Sequence; identical to SEQ ID NO: 500
  Synthetic Oligonucleotide
  misc_feature (1)..(92526): n is a, c, g, or t

SEQ ID NO: 1028 - DNA, 103712 bp, Artificial Sequence; identical to SEQ ID NO: 500
  Synthetic Oligonucleotide
  misc_feature (1)..(92526): n is a, c, g, or t

SEQ ID NO: 1029 - DNA, 104433 bp, Artificial Sequence
  Synthetic Oligonucleotide
  misc_feature (1)..(93287): n is a, c, g, or t
nnnnnnnnnnnnnnnnnnnnnnnnnnnnnnnnnnnnnnnnnnnnnnnnnnnnnnnnnnnnnnnnnnnnnnnnnnnnnnnnnnnnnnnnnnnnnnnnnnnnnnnnnnnnnnnnnnnnnnnnnnnnnnnnnnnnnnnnnnnnnnnnnnnnnnnnnnnnnnnnnnnnnnnnnnnnnnnnnnnnnnnnnnnnnnnnnnnnnnnnnnnnnnnnnnnnnnnnnnnnnnnnnnnnnnnnnnnnnnnnnnnnnnnnnnnnnnnnnnnnnnnnnnnnnnnnnnnnnnnnnnnnnnnnnnnnnnnnnnnnnnnnnnnnnnnnnnnnnnnnnnnnnnnnnnnnnnnnnnnnnnnnnnnnnnnnnnnnnnnnnnnnnnnnnnnnnnnnnnnnnnnnnnnnnnnnnnnnnnnnnnnnnnnnnnnnnnnnnnnnnnnnnnnnnnnnnnnnnnnnnnnnnnnnnnnnnnnnnnnnnnnnnnnnnnnnnnnnnnnnnnnnnnnnnnnnnnnnnnnnnnnnnnnnnnnnnnnnnnnnnnnnnnnnnnnnnnnnnnnnnnnnnnnnnnnnnnnnnnnnnnnnnnnnnnnnnnnnnnnnnnnnnnnnnnnnnnnnnnnnnnnnnnnnnnnnnnnnnnnnnnnnnnnnnnnnnnnnnnnnnnnnnnnnnnnnnnnnnnnnnnnnnnnnnnnnnnnnnnnnnnnnnnnnnnnnnnnnnnnnnnnnnnnnnnnnnnnnnnnnnnnnnnnnnnnnnnnnnnnnnnnnnnnnnnnnnnnnnnnnnnnnnnnnnnnnnnnnnnnnnnnnnnnnnnnnnnnnnnnnnnnnnnnnnnnnnnnnnnnnnnnnnnnnnnnnnnnnnnnnnnnnnnnnnnnnnnnnnnnnnnnnnnnnnnnnnnnnnnnnnnnnnnnnnnnnnnnnnnnnnnnnnnnnnnnnnnnnnnnnnnnnnnnnnnnnnnnnnnnnnnnnnnnnnnnnnnnnnnnnnnnnnnnnnnnnnnnnnnnnnnnnnnnnnnnnnnnnnnnnnnnnnnnnnnnnnnnnnnnnnnnnnnnnnnnnnnnnnnnnnnnnnnnnnnnnnnnnnnnnnnnnnnnnnnnnnnnnnnnnnnnnnnnnnnnnnnnnnnnnnnnnnnnnnnnnnnnnnnnnnnnnnnnnnnnnnnnnnnnnnnnnnnnnnnnnnnnnnnnnnnnnnnnnnnnnnnnnnnnnnnnnnnnnnnnnnnnnnnnnnnnnnnnnnnnnnnnnnnnnnnnnnnnnnnnnnnnnnnnnnnnnnnnnnnnnnnnnnnnnnnnnnnnnnnnnnnnnnnnnnnnnnnnnnnnnnnnnnnnnnnnnnnnnnnnnnnnnnnnnnnnnnnnnnnnnnnnnnnnnnnnnnnnnnnnnnnnnnnnnnnnnnnnnnnnnnnnnnnnnnnnnnnnnnnnnnnnnnnnnnnnnnnnnnnnnnnnnnnnnnnnnnnnnnnnnnnnnnnnnnnnnnnnnnnnnnnnnnnnnnnnnnnnnnnnnnnnnnnnnnnnnnnnnnnnnnnnnnnnnnnnnnnnnnnnnnnnnnnnnnnnnnnnnnnnnnnnnnnnnnnnnnnnnnnnnnnnnnnnnnnnnnnnnnnnnnnnnnnnnnnnnnnnnnnnnnnnnnnnnnnnnnnnnnnnnnnnnnnnnnnnnnnnnnnnnnnnnnnnnnnnnnnnnnnnnnnnnnnnnnnnnnnnnnnnnnnnnnnnnnnnnnnnnnnnnnnnnnnnnnnnnnnnnnnnnnnnnnnnnnnnnnnnnnnnnnnnnnnnnnnnnnnnnnnnnnnnnnnnnnnnnnnnnnnnnnnnnnnnnnnnnnnnnnnnnnnnnnnnnnnnnnnnnnnnnnnnnnnnnnnnnnnnnnnnnnnnnnnnnnnnnnnnnnnnnnnnnnnnnnnnnnnnnnnnnnnnnnnnnnnnnnnnnnnnnnnnnnnnnnnnnnnnnnnnnnnnnnnnnnnnnnnnnnnnnnnnnnnnnnnnnnnnnnnnnnnnnnnnnnnnnnnnnnnnnnnnnnnnnnnnnnnnnnnnnnnnnnnnnnnnnnnnnnnnnnnnnnnnnnnnnnnnnnnnnnnnnnnnnnnnnnnnnnnnnnnnnnnnnnnnnnnnnnnnnnnnnnnnnnnnnnnnnnnnnnnnnnnnnnnnnnnnnnnnnnnnnnnnnnnnnnnnnnnnnnnnnnnnnnnnnnnnnnnnnnnnnnnnnnnnnnnnnnnnnnnnnnnnnnnnnnnnnnnnnnnnnnnnnnnnnnnnnnnnnnnnnnnnnnnnnnnnnnnnnnnnnnnnnnnnnnnnnnnnnnnnnnnnnnnnnnnnnnnnnnnnnnnnnnnnnnnnnnnnnnnnnnnnnnnnnnnnnnnnnnnnnnnnnnnnnnnnnnnnnnnnnnnnnnnnnnnnnnnnnnnnnnnnnnnnnnnnnnnnnnnnnnnnnnnnnnnnnnnnnnnnnnnnnnnnnnnnnnnnnnnnnnnnnnnnnnnnnnnnnnnnnnnnnnnnnnnnnnnnnnnnnnnnnnnnnnnnnnnnnnnnnnnnnnnnnnnnnnnnnnnnnnnnnnnnnnnnnnnnnnnnnnnnnnnnnnnnnnnnnnnnnnnnnnnnnnnnnnnnnnnnnnnnnnnnnnnnnnnnnnnnnnnnnnnnnnnnnnnnnnnnnnnnnnnnnnnnnnnnnnnnnnnnnnnnnnnnnnnnnnnnnnnnnnnnnnnnnnnnnnnnnnnnnnnnnnnnnnnnnnnnnnnnnnnnnnnnnnnnnnnnnnnnnnnnnnnnnnnnnnnnnnnnnnnnnnnnnnnnnnnnnnnnnnnnnnnnnnnnnnnnnnnnnnnnnnnnnnnnnnnnnnnnnnnnnnnnnnnnnnnnnnnnnnnnnnnnnnnnnnnnnnnnnnnnnnnnnnnnnnnnnnnnnnnnnnnnnnnnnnnnnnnnnnnnnnnnnnnnnnnnnnnnnnnnnnnnnnnnnnnnnnnnnnnnnnnnnnnnnnnnnnnnnnnnnnnnnnnnnnnnnnnnnnnnnnnnnnnnnnnnnnnnnnnnnnnnnnnnnnnnnnnnnnnnnnnnnnnnnnnnnnnnnnnnnnnnnnnnnnnnnnnnnnnnnnnnnnnnnnnnnnnnnnnnnnnnnnnnnnnnnnnnnnnnnnnnnnnnnnnnnnnnnnnnnnnnnnnnnnnnnnnnnnnnnnnnnnnnnnnnnnnnnnnnnnnnnnnnnnnnnnnnnnnnnnnnnnnnnnnnnnnnnnnnnnnnnnnnnnnnnnnnnnnnnnnnnnnnnnnnnnnnnnnnnnnnnnnnnnnnnnnnnnnnnnnnnnnnnnnnnnnnnnnnnnnnnnnnnnnnnnnnnnnnnnnnnnnnnnnnnnnnnnnnnnnnnnnnnnnnnnnnnnnnnnnnnnnnnnnnnnnnnnnnnnnnnnnnnnnnnnnnnnnnnnnnnnnnnnnnnnnnnnnnnnnnnnnnnnnnnnnnnnnnnnnnnnnnnnnnnnnnnnnnnnnnnnnnnnnnnnnnnnnnnnnnnnnnnnnnnnnnnnnnnnnnnnnnnnnnnnnnnnnnnnnnnnnnnnnnnnnnnnnnnnnnnnnnnnnnnnnnnnnnnnnnnnnnnnnnnnnnnnnnnnnnnnnnnnnnnnnnnnnnnnnnnnnnnnnnnnnnnnnnnnnnnnnnnnnnnnnnnnnnnnnnnnnnnnnnnnnnnnnnnnnnnnnnnnnnnnnnnnnnnnnnnnnnnnnnnnnnnnnnnnnnnnnnnnnnnnnnnnnnnnnnnnnnnnnnnnnnnnnnnnnnnnnnnnnnnnnnnnnnnnnnnnnnnnnnnnnnnnnnnnnnnnnnnnnnnnnnnnnnnnnnnnnnnnnnnnnnnnnnnnnnnnnnnnnnnnnnnnnnnnnnnnnnnnnnnnnnnnnnnnnnnnnnnnnnnnnnnnnnnnnnnnnnnnnnnnnnnnnnnnnnnnnnnnnnnnnnnnnnnnnnnnnnnnnnnnnnnnnnnnnnnnnnnnnnnnnnnnnnnnnnnnnnnnnnnnnnnnnnnnnnnnnnnnnnnnnnnnnnnnnnnnnnnnnnnnnnnnnnnnnnnnnnnnnnnnnnnnnnnnnnnnnnnnnnnnnnnnnnnnnnnnnnnnnnnnnnnnnnnnnnnnnnnnnnnnnnnnnnnnnnnnnnnnnnnnnnnnnnnnnnnnnnnnnnnnnnnnnnnnnnnnnnnnnnnnnnnnnnnnnnnnnnnnnnnnnnnnnnnnnnnnnnnnnnnnnnnnnnnnnnnnnnnnnnnnnnnnnnnnnnnnnnnnnnnnnnnnnnnnnnnnnnnnnnnnnnnnnnnnnnnnnnnnnnnnnnnnnnnnnnnnnnnnnnnnnnnnnnnnnnnnnnnnnnnnnnnnnnnnnnnnnnnnnnnnnnnnnnnnnnnnnnnnnnnnnnnnnnnnnnnnnnnnnnnnnnnnnnnnnnnnnnnnnnnnnnnnnnnnnnnnnnnnnnnnnnnnnnnnnnnnnnnnnnnnnnnnnnnnnnnnnnnnnnnnnnnnnnnnnnnnnnnnnnnnnnnnnnnnnnnnnnnnnnnnnnnnnnnnnnnnnnnnnnnnnnnnnnnnnnnnnnnnnnnnnnnnnnnnnnnnnnnnnnnnnnnnnnnnnnnnnnnnnnnnnnnnnnnnnnnnnnnnnnnnnnnnnnnnnnnnnnnnnnnnnnnnnnnnnnnnnnnnnnnnnnnnnnnnnnnnnnnnnnnnnnnnnnnnnnnnnnnnnnnnnnnnnnnnnnnnnnnnnnnnnnnnnnnnnnnnnnnnnnnnnnnnnnnnnnnnnnnnnnnnnnnnnnnnnnnnnnnnnnnnnnnnnnnnnnnnnnnnnnnnnnnnnnnnnnnnnnnnnnnnnnnnnnnnnnnnnnnnnnnnnnnnnnnnnnnnnnnnnnnnnnnnnnnnnnnnnnnnnnnnnnnnnnnnnnnnnnnnnnnnnnnnnnnnnnnnnnnnnnnnnnnnnnnnnnnnnnnnnnnnnnnnnnnnnnnnnnnnnnnnnnnnnnnnnnnnnnnnnnnnnnnnnnnnnnnnnnnnnnnnnnnnnnnnnnnnnnnnnnnnnnnnnnnnnnnnnnnnnnnnnnnnnnnnnnnnnnnnnnnnnnnnnnnnnnnnnnnnnnnnnnnnnnnnnnnnnnnnnnnnnnnnnnnnnnnnnnnnnnnnnnnnnnnnnnnnnnnnnnnnnnnnnnnnnnnnnnnnnnnnnnnnnnnnnnnnnnnnnnnnnnnnnnnnnnnnnnnnnnnnnnnnnnnnnnnnnnnnnnnnnnnnnnnnnnnnnnnnnnnnnnnnnnnnnnnnnnnnnnnnnnnnnnnnnnnnnnnnnnnnnnnnnnnnnnnnnnnnnnnnnnnnnnnnnnnnnnnnnnnnnnnnnnnnnnnnnnnnnnnnnnnnnnnnnnnnnnnnnnnnnnnnnnnnnnnnnnnnnnnnnnnnnnnnnnnnnnnnnnnnnnnnnnnnnnnnnnnnnnnnnnnnnnnnnnnnnnnnnnnnnnnnnnnnnnnnnnnnnnnnnnnnnnnnnnnnnnnnnnnnnnnnnnnnnnnnnnnnnnnnnnnnnnnnnnnnnnnnnnnnnnnnnnnnnnnnnnnnnnnnnnnnnnnnnnnnnnnnnnnnnnnnnnnnnnnnnnnnnnnnnnnnnnnnnnnnnnnnnnnnnnnnnnnnnnnnnnnnnnnnnnnnnnnnnnnnnnnnnnnnnnnnnnnnnnnnnnnnnnnnnnnnnnnnnnnnnnnnnnnnnnnnnnnnnnnnnnnnnnnnnnnnnnnnnnnnnnnnnnnnnnnnnnnnnnnnnnnnnnnnnnnnnnnnnnnnnnnnnnnnnnnnnnnnnnnnnnnnnnnnnnnnnnnnnnnnnnnnnnnnnnnnnnnnnnnnnnnnnnnnnnnnnnnnnnnnnnnnnnnnnnnnnnnnnnnnnnnnnnnnnnnnnnnnnnnnnnnnnnnnnnnnnnnnnnnnnnnnnnnnnnnnnnnnnnnnnnnnnnnnnnnnnnnnnnnnnnnnnnnnnnnnnnnnnnnnnnnnnnnnnnnnnnnnnnnnnnnnnnnnnnnnnnnnnnnnnnnnnnnnnnnnnnnnnnnnnnnnnnnnnnnnnnnnnnnnnnnnnnnnnnnnnnnnnnnnnnnnnnnnnnnnnnnnnnnnnnnnnnnnnnnnnnnnnnnnnnnnnnnnnnnnnnnnnnnnnnnnnnnnnnnnnnnnnnnnnnnnnnnnnnnnnnnnnnnnnnnnnnnnnnnnnnnnnnnnnnnnnnnnnnnnnnnnnnnnnnnnnnnnnnnnnnnnnnnnnnnnnnnnnnnnnnnnnnnnnnnnnnnnnnnnnnnnnnnnnnnnnnnnnnnnnnnnnnnnnnnnnnnnnnnnnnnnnnnnnnnnnnnnnnnnnnnnnnnnnnnnnnnnnnnnnnnnnnnnnnnnnnnnnnnnnnnnnnnnnnnnnnnnnnnnnnnnnnnnnnnnnnnnnnnnnnnnnnnnnnnnnnnnnnnnnnnnnnnnnnnnnnnnnnnnnnnnnnnnnnnnnnnnnnnnnnnnnnnnnnnnnnnnnnnnnnnnnnnnnnnnnnnnnnnnnnnnnnnnnnnnnnnnnnnnnnnnnnnnnnnnnnnnnnnnnnnnnnnnnnnnnnnnnnnnnnnnnnnnnnnnnnnnnnnnnnnnnnnnnnnnnnnnnnnnnnnnnnnnnnnnnnnnnnnnnnnnnnnnnnnnnnnnnnnnnnnnnnnnnnnnnnnnnnnnnnnnnnnnnnnnnnnnnnnnnnnnnnnnnnnnnnnnnnnnnnnnnnnnnnnnnnnnnnnnnnnnnnnnnnnnnnnnnnnnnnnnnnnnnnnnnnnnnnnnnnnnnnnnnnnnnnnnnnnnnnnnnnnnnnnnnnnnnnnnnnnnnnnnnnnnnnnnnnnnnnnnnnnnnnnnnnnnnnnnnnnnnnnnnnnnnnnnnnnnnnnnnnnnnnnnnnnnnnnnnnnnnnnnnnnnnnnnnnnnnnnnnnnnnnnnnnnnnnnnnnnnnnnnnnnnnnnnnnnnnnnnnnnnnnnnnnnnnnnnnnnnnnnnnnnnnnnnnnnnnnnnnnnnnnnnnnnnnnnnnnnnnnnnnnnnnnnnnnnnnnnnnnnnnnnnnnnnnnnnnnnnnnnnnnnnnnnnnnnnnnnnnnnnnnnnnnnnnnnnnnnnnnnnnnnnnnnnnnnnnnnnnnnnnnnnnnnnnnnnnnnnnnnnnnnnnnnnnnnnnnnnnnnnnnnnnnnnnnnnnnnnnnnnnnnnnnnnnnnnnnnnnnnnnnnnnnnnnnnnnnnnnnnnnnnnnnnnnnnnnnnnnnnnnnnnnnnnnnnnnnnnnnnnnnnnnnnnnnnnnnnnnnnnnnnnnnnnnnnnnnnnnnnnnnnnnnnnnnnnnnnnnnnnnnnnnnnnnnnnnnnnnnnnnnnnnnnnnnnnnnnnnnnnnnnnnnnnnnnnnnnnnnnnnnnnnnnnnnnnnnnnnnnnnnnnnnnnnnnnnnnnnnnnnnnnnnnnnnnnnnnnnnnnnnnnnnnnnnnnnnnnnnnnnnnnnnnnnnnnnnnnnnnnnnnnnnnnnnnnnnnnnnnnnnnnnnnnnnnnnnnnnnnnnnnnnnnnnnnnnnnnnnnnnnnnnnnnnnnnnnnnnnnnnnnnnnnnnnnnnnnnnnnnnnnnnnnnnnnnnnnnnnnnnnnnnnnnnnnnnnnnnnnnnnnnnnnnnnnnnnnnnnnnnnnnnnnnnnnnnnnnnnnnnnnnnnnnnnnnnnnnnnnnnnnnnnnnnnnnnnnnnnnnnnnnnnnnnnnnnnnnnnnnnnnnnnnnnnnnnnnnnnnnnnnnnnnnnnnnnnnnnnnnnnnnnnnnnnnnnnnnnnnnnnnnnnnnnnnnnnnnnnnnnnnnnnnnnnnnnnnnnnnnnnnnnnnnnnnnnnnnnnnnnnnnnnnnnnnnnnnnnnnnnnnnnnnnnnnnnnnnnnnnnnnnnnnnnnnnnnnnnnnnnnnnnnnnnnnnnnnnnnnnnnnnnnnnnnnnnnnnnnnnnnnnnnnnnnnnnnnnnnnnnnnnnnnnnnnnnnnnnnnnnnnnnnnnnnnnnnnnnnnnnnnnnnnnnnnnnnnnnnnnnnnnnnnnnnnnnnnnnnnnnnnnnnnnnnnnnnnnnnnnnnnnnnnnnnnnnnnnnnnnnnnnnnnnnnnnnnnnnnnnnnnnnnnnnnnnnnnnnnnnnnnnnnnnnnnnnnnnnnnnnnnnnnnnnnnnnnnnnnnnnnnnnnnnnnnnnnnnnnnnnnnnnnnnnnnnnnnnnnnnnnnnnnnnnnnnnnnnnnnnnnnnnnnnnnnnnnnnnnnnnnnnnnnnnnnnnnnnnnnnnnnnnnnnnnnnnnnnnnnnnnnnnnnnnnnnnnnnnnnnnnnnnnnnnnnnnnnnnnnnnnnnnnnnnnnnnnnnnnnnnnnnnnnnnnnnnnnnnnnnnnnnnnnnnnnnnnnnnnnnnnnnnnnnnnnnnnnnnnnnnnnnnnnnnnnnnnnnnnnnnnnnnnnnnnnnnnnnnnnnnnnnnnnnnnnnnnnnnnnnnnnnnnnnnnnnnnnnnnnnnnnnnnnnnnnnnnnnnnnnnnnnnnnnnnnnnnnnnnnnnnnnnnnnnnnnnnnnnnnnnnnnnnnnnnnnnnnnnnnnnnnnnnnnnnnnnnnnnnnnnnnnnnnnnnnnnnnnnnnnnnnnnnnnnnnnnnnnnnnnnnnnnnnnnnnnnnnnnnnnnnnnnnnnnnnnnnnnnnnnnnnnnnnnnnnnnnnnnnnnnnnnnnnnnnnnnnnnnnnnnnnnnnnnnnnnnnnnnnnnnnnnnnnnnnnnnnnnnnnnnnnnnnnnnnnnnnnnnnnnnnnnnnnnnnnnnnnnnnnnnnnnnnnnnnnnnnnnnnnnnnnnnnnnnnnnnnnnnnnnnnnnnnnnnnnnnnnnnnnnnnnnnnnnnnnnnnnnnnnnnnnnnnnnnnnnnnnnnnnnnnnnnnnnnnnnnnnnnnnnnnnnnnnnnnnnnnnnnnnnnnnnnnnnnnnnnnnnnnnnnnnnnnnnnnnnnnnnnnnnnnnnnnnnnnnnnnnnnnnnnnnnnnnnnnnnnnnnnnnnnnnnnnnnnnnnnnnnnnnnnnnnnnnnnnnnnnnnnnnnnnnnnnnnnnnnnnnnnnnnnnnnnnnnnnnnnnnnnnnnnnnnnnnnnnnnnnnnnnnnnnnnnnnnnnnnnnnnnnnnnnnnnnnnnnnnnnnnnnnnnnnnnnnnnnnnnnnnnnnnnnnnnnnnnnnnnnnnnnnnnnnnnnnnnnnnnnnnnnnnnnnnnnnnnnnnnnnnnnnnnnnnnnnnnnnnnnnnnnnnnnnnnnnnnnnnnnnnnnnnnnnnnnnnnnnnnnnnnnnnnnnnnnnnnnnnnnnnnnnnnnnnnnnnnnnnnnnnnnnnnnnnnnnnnnnnnnnnnnnnnnnnnnnnnnnnnnnnnnnnnnnnnnnnnnnnnnnnnnnnnnnnnnnnnnnnnnnnnnnnnnnnnnnnnnnnnnnnnnnnnnnnnnnnnnnnnnnnnnnnnnnnnnnnnnnnnnnnnnnnnnnnnnnnnnnnnnnnnnnnnnnnnnnnnnnnnnnnnnnnnnnnnnnnnnnnnnnnnnnnnnnnnnnnnnnnnnnnnnnnnnnnnnnnnnnnnnnnnnnnnnnnnnnnnnnnnnnnnnnnnnnnnnnnnnnnnnnnnnnnnnnnnnnnnnnnnnnnnnnnnnnnnnnnnnnnnnnnnnnnnnnnnnnnnnnnnnnnnnnnnnnnnnnnnnnnnnnnnnnnnnnnnnnnnnnnnnnnnnnnnnnnnnnnnnnnnnnnnnnnnnnnnnnnnnnnnnnnnnnnnnnnnnnnnnnnnnnnnnnnnnnnnnnnnnnnnnnnnnnnnnnnnnnnnnnnnnnnnnnnnnnnnnnnnnnnnnnnnnnnnnnnnnnnnnnnnnnnnnnnnnnnnnnnnnnnnnnnnnnnnnnnnnnnnnnnnnnnnnnnnnnnnnnnnnnnnnnnnnnnnnnnnnnnnnnnnnnnnnnnnnnnnnnnnnnnnnnnnnnnnnnnnnnnnnnnnnnnnnnnnnnnnnnnnnnnnnnnnnnnnnnnnnnnnnnnnnnnnnnnnnnnnnnnnnnnnnnnnnnnnnnnnnnnnnnnnnnnnnnnnnnnnnnnnnnnnnnnnnnnnnnnnnnnnnnnnnnnnnnnnnnnnnnnnnnnnnnnnnnnnnnnnnnnnnnnnnnnnnnnnnnnnnnnnnnnnnnnnnnnnnnnnnnnnnnnnnnnnnnnnnnnnnnnnnnnnnnnnnnnnnnnnnnnnnnnnnnnnnnnnnnnnnnnnnnnnnnnnnnnnnnnnnnnnnnnnnnnnnnnnnnnnnnnnnnnnnnnnnnnnnnnnnnnnnnnnnnnnnnnnnnnnnnnnnnnnnnnnnnnnnnnnnnnnnnnnnnnnnnnnnnnnnnnnnnnnnnnnnnnnnnnnnnnnnnnnnnnnnnnnnnnnnnnnnnnnnnnnnnnnnnnnnnnnnnnnnnnnnnnnnnnnnnnnnnnnnnnnnnnnnnnnnnnnnnnnnnnnnnnnnnnnnnnnnnnnnnnnnnnnnnnnnnnnnnnnnnnnnnnnnnnnnnnnnnnnnnnnnnnnnnnnnnnnnnnnnnnnnnnnnnnnnnnnnnnnnnnnnnnnnnnnnnnnnnnnnnnnnnnnnnnnnnnnnnnnnnnnnnnnnnnnnnnnnnnnnnnnnnnnnnnnnnnnnnnnnnnnnnnnnnnnnnnnnnnnnnnnnnnnnnnnnnnnnnnnnnnnnnnnnnnnnnnnnnnnnnnnnnnnnnnnnnnnnnnnnnnnnnnnnnnnnnnnnnnnnnnnnnnnnnnnnnnnnnnnnnnnnnnnnnnnnnnnnnnnnnnnnnnnnnnnnnnnnnnnnnnnnnnnnnnnnnnnnnnnnnnnnnnnnnnnnnnnnnnnnnnnnnnnnnnnnnnnnnnnnnnnnnnnnnnnnnnnnnnnnnnnnnnnnnnnnnnnnnnnnnnnnnnnnnnnnnnnnnnnnnnnnnnnnnnnnnnnnnnnnnnnnnnnnnnnnnnnnnnnnnnnnnnnnnnnnnnnnnnnnnnnnnnnnnnnnnnnnnnnnnnnnnnnnnnnnnnnnnnnnnnnnnnnnnnnnnnnnnnnnnnnnnnnnnnnnnnnnnnnnnnnnnnnnnnnnnnnnnnnnnnnnnnnnnnnnnnnnnnnnnnnnnnnnnnnnnnnnnnnnnnnnnnnnnnnnnnnnnnnnnnnnnnnnnnnnnnnnnnnnnnnnnnnnnnnnnnnnnnnnnnnnnnnnnnnnnnnnnnnnnnnnnnnnnnnnnnnnnnnnnnnnnnnnnnnnnnnnnnnnnnnnnnnnnnnnnnnnnnnnnnnnnnnnnnnnnnnnnnnnnnnnnnnnnnnnnnnnnnnnnnnnnnnnnnnnnnnnnnnnnnnnnnnnnnnnnnnnnnnnnnnnnnnnnnnnnnnnnnnnnnnnnnnnnnnnnnnnnnnnnnnnnnnnnnnnnnnnnnnnnnnnnnnnnnnnnnnnnnnnnnnnnnnnnnnnnnnnnnnnnnnnnnnnnnnnnnnnnnnnnnnnnnnnnnnnnnnnnnnnnnnnnnnnnnnnnnnnnnnnnnnnnnnnnnnnnnnnnnnnnnnnnnnnnnnnnnnnnnnnnnnnnnnnnnnnnnnnnnnnnnnnnnnnnnnnnnnnnnnnnnnnnnnnnnnnnnnnnnnnnnnnnnnnnnnnnnnnnnnnnnnnnnnnnnnnnnnnnnnnnnnnnnnnnnnnnnnnnnnnnnnnnnnnnnnnnnnnnnnnnnnnnnnnnnnnnnnnnnnnnnnnnnnnnnnnnnnnnnnnnnnnnnnnnnnnnnnnnnnnnnnnnnnnnnnnnnnnnnnnnnnnnnnnnnnnnnnnnnnnnnnnnnnnnnnnnnnnnnnnnnnnnnnnnnnnnnnnnnnnnnnnnnnnnnnnnnnnnnnnnnnnnnnnnnnnnnnnnnnnnnnnnnnnnnnnnnnnnnnnnnnnnnnnnnnnnnnnnnnnnnnnnnnnnnnnnnnnnnnnnnnnnnnnnnnnnnnnnnnnnnnnnnnnnnnnnnnnnnnnnnnnnnnnnnnnnnnnnnnnnnnnnnnnnnnnnnnnnnnnnnnnnnnnnnnnnnnnnnnnnnnnnnnnnnnnnnnnnnnnnnnnnnnnnnnnnnnnnnnnnnnnnnnnnnnnnnnnnnnnnnnnnnnnnnnnnnnnnnnnnnnnnnnnnnnnnnnnnnnnnnnnnnnnnnnnnnnnnnnnnnnnnnnnnnnnnnnnnnnnnnnnnnnnnnnnnnnnnnnnnnnnnnnnnnnnnnnnnnnnnnnnnnnnnnnnnnnnnnnnnnnnnnnnnnnnnnnnnnnnnnnnnnnnnnnnnnnnnnnnnnnnnnnnnnnnnnnnnnnnnnnnnnnnnnnnnnnnnnnnnnnnnnnnnnnnnnnnnnnnnnnnnnnnnnnnnnnnnnnnnnnnnnnnnnnnnnnnnnnnnnnnnnnnnnnnnnnnnnnnnnnnnnnnnnnnnnnnnnnnnnnnnnnnnnnnnnnnnnnnnnnnnnnnnnnnnnnnnnnnnnnnnnnnnnnnnnnnnnnnnnnnnnnnnnnnnnnnnnnnnnnnnnnnnnnnnnnnnnnnnnnnnnnnnnnnnnnnnnnnnnnnnnnnnnnnnnnnnnnnnnnnnnnnnnnnnnnnnnnnnnnnnnnnnnnnnnnnnnnnnnnnnnnnnnnnnnnnnnnnnnnnnnnnnnnnnnnnnnnnnnnnnnnnnnnnnnnnnnnnnnnnnnnnnnnnnnnnnnnnnnnnnnnnnnnnnnnnnnnnnnnnnnnnnnnnnnnnnnnnnnnnnnnnnnnnnnnnnnnnnnnnnnnnnnnnnnnnnnnnnnnnnnnnnnnnnnnnnnnnnnnnnnnnnnnnnnnnnnnnnnnnnnnnnnnnnnnnnnnnnnnnnnnnnnnnnnnnnnnnnnnnnnnnnnnnnnnnnnnnnnnnnnnnnnnnnnnnnnnnnnnnnnnnnnnnnnnnnnnnnnnnnnnnnnnnnnnnnnnnnnnnnnnnnnnnnnnnnnnnnnnnnnnnnnnnnnnnnnnnnnnnnnnnnnnnnnnnnnnnnnnnnnnnnnnnnnnnnnnnnnnnnnnnnnnnnnnnnnnnnnnnnnnnnnnnnnnnnnnnnnnnnnnnnnnnnnnnnnnnnnnnnnnnnnnnnnnnnnnnnnnnnnnnnnnnnnnnnnnnnnnnnnnnnnnnnnnnnnnnnnnnnnnnnnnnnnnnnnnnnnnnnnnnnnnnnnnnnnnnnnnnnnnnnnnnnnnnnnnnnnnnnnnnnnnnnnnnnnnnnnnnnnnnnnnnnnnnnnnnnnnnnnnnnnnnnnnnnnnnnnnnnnnnnnnnnnnnnnnnnnnnnnnnnnnnnnnnnnnnnnnnnnnnnnnnnnnnnnnnnnnnnnnnnnnnnnnnnnnnnnnnnnnnnnnnnnnnnnnnnnnnnnnnnnnnnnnnnnnnnnnnnnnnnnnnnnnnnnnnnnnnnnnnnnnnnnnnnnnnnnnnnnnnnnnnnnnnnnnnnnnnnnnnnnnnnnnnnnnnnnnnnnnnnnnnnnnnnnnnnnnnnnnnnnnnnnnnnnnnnnnnnnnnnnnnnnnnnnnnnnnnnnnnnnnnnnnnnnnnnnnnnnnnnnnnnnnnnnnnnnnnnnnnnnnnnnnnnnnnnnnnnnnnnnnnnnnnnnnnnnnnnnnnnnnnnnnnnnnnnnnnnnnnnnnnnnnnnnnnnnnnnnnnnnnnnnnnnnnnnnnnnnnnnnnnnnnnnnnnnnnnnnnnnnnnnnnnnnnnnnnnnnnnnnnnnnnnnnnnnnnnnnnnnnnnnnnnnnnnnnnnnnnnnnnnnnnnnnnnnnnnnnnnnnnnnnnnnnnnnnnnnnnnnnnnnnnnnnnnnnnnnnnnnnnnnnnnnnnnnnnnnnnnnnnnnnnnnnnnnnnnnnnnnnnnnnnnnnnnnnnnnnnnnnnnnnnnnnnnnnnnnnnnnnnnnnnnnnnnnnnnnnnnnnnnnnnnnnnnnnnnnnnnnnnnnnnnnnnnnnnnnnnnnnnnnnnnnnnnnnnnnnnnnnnnnnnnnnnnnnnnnnnnnnnnnnnnnnnnnnnnnnnnnnnnnnnnnnnnnnnnnnnnnnnnnnnnnnnnnnnnnnnnnnnnnnnnnnnnnnnnnnnnnnnnnnnnnnnnnnnnnnnnnnnnnnnnnnnnnnnnnnnnnnnnnnnnnnnnnnnnnnnnnnnnnnnnnnnnnnnnnnnnnnnnnnnnnnnnnnnnnnnnnnnnnnnnnnnnnnnnnnnnnnnnnnnnnnnnnnnnnnnnnnnnnnnnnnnnnnnnnnnnnnnnnnnnnnnnnnnnnnnnnnnnnnnnnnnnnnnnnnnnnnnnnnnnnnnnnnnnnnnnnnnnnnnnnnnnnnnnnnnnnnnnnnnnnnnnnnnnnnnnnnnnnnnnnnnnnnnnnnnnnnnnnnnnnnnnnnnnnnnnnnnnnnnnnnnnnnnnnnnnnnnnnnnnnnnnnnnnnnnnnnnnnnnnnnnnnnnnnnnnnnnnnnnnnnnnnnnnnnnnnnnnnnnnnnnnnnnnnnnnnnnnnnnnnnnnnnnnnnnnnnnnnnnnnnnnnnnnnnnnnnnnnnnnnnnnnnnnnnnnnnnnnnnnnnnnnnnnnnnnnnnnnnnnnnnnnnnnnnnnnnnnnnnnnnnnnnnnnnnnnnnnnnnnnnnnnnnnnnnnnnnnnnnnnnnnnnnnnnnnnnnnnnnnnnnnnnnnnnnnnnnnnnnnnnnnnnnnnnnnnnnnnnnnnnnnnnnnnnnnnnnnnnnnnnnnnnnnnnnnnnnnnnnnnnnnnnnnnnnnnnnnnnnnnnnnnnnnnnnnnnnnnnnnnnnnnnnnnnnnnnnnnnnnnnnnnnnnnnnnnnnnnnnnnnnnnnnnnnnnnnnnnnnnnnnnnnnnnnnnnnnnnnnnnnnnnnnnnnnnnnnnnnnnnnnnnnnnnnnnnnnnnnnnnnnnnnnnnnnnnnnnnnnnnnnnnnnnnnnnnnnnnnnnnnnnnnnnnnnnnnnnnnnnnnnnnnnnnnnnnnnnnnnnnnnnnnnnnnnnnnnnnnnnnnnnnnnnnnnnnnnnnnnnnnnnnnnnnnnnnnnnnnnnnnnnnnnnnnnnnnnnnnnnnnnnnnnnnnnnnnnnnnnnnnnnnnnnnnnnnnnnnnnnnnnnnnnnnnnnnnnnnnnnnnnnnnnnnnnnnnnnnnnnnnnnnnnnnnnnnnnnnnnnnnnnnnnnnnnnnnnnnnnnnnnnnnnnnnnnnnnnnnnnnnnnnnnnnnnnnnnnnnnnnnnnnnnnnnnnnnnnnnnnnnnnnnnnnnnnnnnnnnnnnnnnnnnnnnnnnnnnnnnnnnnnnnnnnnnnnnnnnnnnnnnnnnnnnnnnnnnnnnnnnnnnnnnnnnnnnnnnnnnnnnnnnnnnnnnnnnnnnnnnnnnnnnnnnnnnnnnnnnnnnnnnnnnnnnnnnnnnnnnnnnnnnnnnnnnnnnnnnnnnnnnnnnnnnnnnnnnnnnnnnnnnnnnnnnnnnnnnnnnnnnnnnnnnnnnnnnnnnnnnnnnnnnnnnnnnnnnnnnnnnnnnnnnnnnnnnnnnnnnnnnnnnnnnnnnnnnnnnnnnnnnnnnnnnnnnnnnnnnnnnnnnnnnnnnnnnnnnnnnnnnnnnnnnnnnnnnnnnnnnnnnnnnnnnnnnnnnnnnnnnnnnnnnnnnnnnnnnnnnnnnnnnnnnnnnnnnnnnnnnnnnnnnnnnnnnnnnnnnnnnnnnnnnnnnnnnnnnnnnnnnnnnnnnnnnnnnnnnnnnnnnnnnnnnnnnnnnnnnnnnnnnnnnnnnnnnnnnnnnnnnnnnnnnnnnnnnnnnnnnnnnnnnnnnnnnnnnnnnnnnnnnnnnnnnnnnnnnnnnnnnnnnnnnnnnnnnnnnnnnnnnnnnnnnnnnnnnnnnnnnnnnnnnnnnnnnnnnnnnnnnnnnnnnnnnnnnnnnnnnnnnnnnnnnnnnnnnnnnnnnnnnnnnnnnnnnnnnnnnnnnnnnnnnnnnnnnnnnnnnnnnnnnnnnnnnnnnnnnnnnnnnnnnnnnnnnnnnnnnnnnnnnnnnnnnnnnnnnnnnnnnnnnnnnnnnnnnnnnnnnnnnnnnnnnnnnnnnnnnnnnnnnnnnnnnnnnnnnnnnnnnnnnnnnnnnnnnnnnnnnnnnnnnnnnnnnnnnnnnnnnnnnnnnnnnnnnnnnnnnnnnnnnnnnnnnnnnnnnnnnnnnnnnnnnnnnnnnnnnnnnnnnnnnnnnnnnnnnnnnnnnnnnnnnnnnnnnnnnnnnnnnnnnnnnnnnnnnnnnnnnnnnnnnnnnnnnnnnnnnnnnnnnnnnnnnnnnnnnnnnnnnnnnnnnnnnnnnnnnnnnnnnnnnnnnnnnnnnnnnnnnnnnnnnnnnnnnnnnnnnnnnnnnnnnnnnnnnnnnnnnnnnnnnnnnnnnnnnnnnnnnnnnnnnnnnnnnnnnnnnnnnnnnnnnnnnnnnnnnnnnnnnnnnnnnnnnnnnnnnnnnnnnnnnnnnnnnnnnnnnnnnnnnnnnnnnnnnnnnnnnnnnnnnnnnnnnnnnnnnnnnnnnnnnnnnnnnnnnnnnnnnnnnnnnnnnnnnnnnnnnnnnnnnnnnnnnnnnnnnnnnnnnnnnnnnnnnnnnnnnnnnnnnnnnnnnnnnnnnnnnnnnnnnnnnnnnnnnnnnnnnnnnnnnnnnnnnnnnnnnnnnnnnnnnnnnnnnnnnnnnnnnnnnnnnnnnnnnnnnnnnnnnnnnnnnnnnnnnnnnnnnnnnnnnnnnnnnnnnnnnnnnnnnnnnnnnnnnnnnnnnnnnnnnnnnnnnnnnnnnnnnnnnnnnnnnnnnnnnnnnnnnnnnnnnnnnnnnnnnnnnnnnnnnnnnnnnnnnnnnnnnnnnnnnnnnnnnnnnnnnnnnnnnnnnnnnnnnnnnnnnnnnnnnnnnnnnnnnnnnnnnnnnnnnnnnnnnnnnnnnnnnnnnnnnnnnnnnnnnnnnnnnnnnnnnnnnnnnnnnnnnnnnnnnnnnnnnnnnnnnnnnnnnnnnnnnnnnnnnnnnnnnnnnnnnnnnnnnnnnnnnnnnnnnnnnnnnnnnnnnnnnnnnnnnnnnnnnnnnnnnnnnnnnnnnnnnnnnnnnnnnnnnnnnnnnnnnnnnnnnnnnnnnnnnnnnnnnnnnnnnnnnnnnnnnnnnnnnnnnnnnnnnnnnnnnnnnnnnnnnnnnnnnnnnnnnnnnnnnnnnnnnnnnnnnnnnnnnnnnnnnnnnnnnnnnnnnnnnnnnnnnnnnnnnnnnnnnnnnnnnnnnnnnnnnnnnnnnnnnnnnnnnnnnnnnnnnnnnnnnnnnnnnnnnnnnnnnnnnnnnnnnnnnnnnnnnnnnnnnnnnnnnnnnnnnnnnnnnnnnnnnnnnnnnnnnnnnnnnnnnnnnnnnnnnnnnnnnnnnnnnnnnnnnnnnnnnnnnnnnnnnnnnnnnnnnnnnnnnnnnnnnnnnnnnnnnnnnnnnnnnnnnnnnnnnnnnnnnnnnnnnnnnnnnnnnnnnnnnnnnnnnnnnnnnnnnnnnnnnnnnnnnnnnnnnnnnnnnnnnnnnnnnnnnnnnnnnnnnnnnnnnnnnnnnnnnnnnnnnnnnnnnnnnnnnnnnnnnnnnnnnnnnnnnnnnnnnnnnnnnnnnnnnnnnnnnnnnnnnnnnnnnnnnnnnnnnnnnnnnnnnnnnnnnnnnnnnnnnnnnnnnnnnnnnnnnnnnnnnnnnnnnnnnnnnnnnnnnnnnnnnnnnnnnnnnnnnnnnnnnnnnnnnnnnnnnnnnnnnnnnnnnnnnnnnnnnnnnnnnnnnnnnnnnnnnnnnnnnnnnnnnnnnnnnnnnnnnnnnnnnnnnnnnnnnnnnnnnnnnnnnnnnnnnnnnnnnnnnnnnnnnnnnnnnnnnnnnnnnnnnnnnnnnnnnnnnnnnnnnnnnnnnnnnnnnnnnnnnnnnnnnnnnnnnnnnnnnnnnnnnnnnnnnnnnnnnnnnnnnnnnnnnnnnnnnnnnnnnnnnnnnnnnnnnnnnnnnnnnnnnnnnnnnnnnnnnnnnnnnnnnnnnnnnnnnnnnnnnnnnnnnnnnnnnnnnnnnnnnnnnnnnnnnnnnnnnnnnnnnnnnnnnnnnnnnnnnnnnnnnnnnnnnnnnnnnnnnnnnnnnnnnnnnnnnnnnnnnnnnnnnnnnnnnnnnnnnnnnnnnnnnnnnnnnnnnnnnnnnnnnnnnnnnnnnnnnnnnnnnnnnnnnnnnnnnnnnnnnnnnnnnnnnnnnnnnnnnnnnnnnnnnnnnnnnnnnnnnnnnnnnnnnnnnnnnnnnnnnnnnnnnnnnnnnnnnnnnnnnnnnnnnnnnnnnnnnnnnnnnnnnnnnnnnnnnnnnnnnnnnnnnnnnnnnnnnnnnnnnnnnnnnnnnnnnnnnnnnnnnnnnnnnnnnnnnnnnnnnnnnnnnnnnnnnnnnnnnnnnnnnnnnnnnnnnnnnnnnnnnnnnnnnnnnnnnnnnnnnnnnnnnnnnnnnnnnnnnnnnnnnnnnnnnnnnnnnnnnnnnnnnnnnnnnnnnnnnnnnnnnnnnnnnnnnnnnnnnnnnnnnnnnnnnnnnnnnnnnnnnnnnnnnnnnnnnnnnnnnnnnnnnnnnnnnnnnnnnnnnnnnnnnnnnnnnnnnnnnnnnnnnnnnnnnnnnnnnnnnnnnnnnnnnnnnnnnnnnnnnnnnnnnnnnnnnnnnnnnnnnnnnnnnnnnnnnnnnnnnnnnnnnnnnnnnnnnnnnnnnnnnnnnnnnnnnnnnnnnnnnnnnnnnnnnnnnnnnnnnnnnnnnnnnnnnnnnnnnnnnnnnnnnnnnnnnnnnnnnnnnnnnnnnnnnnnnnnnnnnnnnnnnnnnnnnnnnnnnnnnnnnnnnnnnnnnnnnnnnnnnnnnnnnnnnnnnnnnnnnnnnnnnnnnnnnnnnnnnnnnnnnnnnnnnnnnnnnnnnnnnnnnnnnnnnnnnnnnnnnnnnnnnnnnnnnnnnnnnnnnnnnnnnnnnnnnnnnnnnnnnnnnnnnnnnnnnnnnnnnnnnnnnnnnnnnnnnnnnnnnnnnnnnnnnnnnnnnnnnnnnnnnnnnnnnnnnnnnnnnnnnnnnnnnnnnnnnnnnnnnnnnnnnnnnnnnnnnnnnnnnnnnnnnnnnnnnnnnnnnnnnnnnnnnnnnnnnnnnnnnnnnnnnnnnnnnnnnnnnnnnnnnnnnnnnnnnnnnnnnnnnnnnnnnnnnnnnnnnnnnnnnnnnnnnnnnnnnnnnnnnnnnnnnnnnnnnnnnnnnnnnnnnnnnnnnnnnnnnnnnnnnnnnnnnnnnnnnnnnnnnnnnnnnnnnnnnnnnnnnnnnnnnnnnnnnnnnnnnnnnnnnnnnnnnnnnnnnnnnnnnnnnnnnnnnnnnnnnnnnnnnnnnnnnnnnnnnnnnnnnnnnnnnnnnnnnnnnnnnnnnnnnnnnnnnnnnnnnnnnnnnnnnnnnnnnnnnnnnnnnnnnnnnnnnnnnnnnnnnnnnnnnnnnnnnnnnnnnnnnnnnnnnnnnnnnnnnnnnnnnnnnnnnnnnnnnnnnnnnnnnnnnnnnnnnnnnnnnnnnnnnnnnnnnnnnnnnnnnnnnnnnnnnnnnnnnnnnnnnnnnnnnnnnnnnnnnnnnnnnnnnnnnnnnnnnnnnnnnnnnnnnnnnnnnnnnnnnnnnnnnnnnnnnnnnnnnnnnnnnnnnnnnnnnnnnnnnnnnnnnnnnnnnnnnnnnnnnnnnnnnnnnnnnnnnnnnnnnnnnnnnnnnnnnnnnnnnnnnnnnnnnnnnnnnnnnnnnnnnnnnnnnnnnnnnnnnnnnnnnnnnnnnnnnnnnnnnnnnnnnnnnnnnnnnnnnnnnnnnnnnnnnnnnnnnnnnnnnnnnnnnnnnnnnnnnnnnnnnnnnnnnnnnnnnnnnnnnnnnnnnnnnnnnnnnnnnnnnnnnnnnnnnnnnnnnnnnnnnnnnnnnnnnnnnnnnnnnnnnnnnnnnnnnnnnnnnnnnnnnnnnnnnnnnnnnnnnnnnnnnnnnnnnnnnnnnnnnnnnnnnnnnnnnnnnnnnnnnnnnnnnnnnnnnnnnnnnnnnnnnnnnnnnnnnnnnnnnnnnnnnnnnnnnnnnnnnnnnnnnnnnnnnnnnnnnnnnnnnnnnnnnnnnnnnnnnnnnnnnnnnnnnnnnnnnnnnnnnnnnnnnnnnnnnnnnnnnnnnnnnnnnnnnnnnnnnnnnnnnnnnnnnnnnnnnnnnnnnnnnnnnnnnnnnnnnnnnnnnnnnnnnnnnnnnnnnnnnnnnnnnnnnnnnnnnnnnnnnnnnnnnnnnnnnnnnnnnnnnnnnnnnnnnnnnnnnnnnnnnnnnnnnnnnnnnnnnnnnnnnnnnnnnnnnnnnnnnnnnnnnnnnnnnnnnnnnnnnnnnnnnnnnnnnnnnnnnnnnnnnnnnnnnnnnnnnnnnnnnnnnnnnnnnnnnnnnnnnnnnnnnnnnnnnnnnnnnnnnnnnnnnnnnnnnnnnnnnnnnnnnnnnnnnnnnnnnnnnnnnnnnnnnnnnnnnnnnnnnnnnnnnnnnnnnnnnnnnnnnnnnnnnnnnnnnnnnnnnnnnnnnnnnnnnnnnnnnnnnnnnnnnnnnnnnnnnnnnnnnnnnnnnnnnnnnnnnnnnnnnnnnnnnnnnnnnnnnnnnnnnnnnnnnnnnnnnnnnnnnnnnnnnnnnnnnnnnnnnnnnnnnnnnnnnnnnnnnnnnnnnnnnnnnnnnnnnnnnnnnnnnnnnnnnnnnnnnnnnnnnnnnnnnnnnnnnnnnnnnnnnnnnnnnnnnnnnnnnnnnnnnnnnnnnnnnnnnnnnnnnnnnnnnnnnnnnnnnnnnnnnnnnnnnnnnnnnnnnnnnnnnnnnnnnnnnnnnnnnnnnnnnnnnnnnnnnnnnnnnnnnnnnnnnnnnnnnnnnnnnnnnnnnnnnnnnnnnnnnnnnnnnnnnnnnnnnnnnnnnnnnnnnnnnnnnnnnnnnnnnnnnnnnnnnnnnnnnnnnnnnnnnnnnnnnnnnnnnnnnnnnnnnnnnnnnnnnnnnnnnnnnnnnnnnnnnnnnnnnnnnnnnnnnnnnnnnnnnnnnnnnnnnnnnnnnnnnnnnnnnnnnnnnnnnnnnnnnnnnnnnnnnnnnnnnnnnnnnnnnnnnnnnnnnnnnnnnnnnnnnnnnnnnnnnnnnnnnnnnnnnnnnnnnnnnnnnnnnnnnnnnnnnnnnnnnnnnnnnnnnnnnnnnnnnnnnnnnnnnnnnnnnnnnnnnnnnnnnnnnnnnnnnnnnnnnnnnnnnnnnnnnnnnnnnnnnnnnnnnnnnnnnnnnnnnnnnnnnnnnnnnnnnnnnnnnnnnnnnnnnnnnnnnnnnnnnnnnnnnnnnnnnnnnnnnnnnnnnnnnnnnnnnnnnnnnnnnnnnnnnnnnnnnnnnnnnnnnnnnnnnnnnnnnnnnnnnnnnnnnnnnnnnnnnnnnnnnnnnnnnnnnnnnnnnnnnnnnnnnnnnnnnnnnnnnnnnnnnnnnnnnnnnnnnnnnnnnnnnnnnnnnnnnnnnnnnnnnnnnnnnnnnnnnnnnnnnnnnnnnnnnnnnnnnnnnnnnnnnnnnnnnnnnnnnnnnnnnnnnnnnnnnnnnnnnnnnnnnnnnnnnnnnnnnnnnnnnnnnnnnnnnnnnnnnnnnnnnnnnnnnnnnnnnnnnnnnnnnnnnnnnnnnnnnnnnnnnnnnnnnnnnnnnnnnnnnnnnnnnnnnnnnnnnnnnnnnnnnnnnnnnnnnnnnnnnnnnnnnnnnnnnnnnnnnnnnnnnnnnnnnnnnnnnnnnnnnnnnnnnnnnnnnnnnnnnnnnnnnnnnnnnnnnnnnnnnnnnnnnnnnnnnnnnnnnnnnnnnnnnnnnnnnnnnnnnnnnnnnnnnnnnnnnnnnnnnnnnnnnnnnnnnnnnnnnnnnnnnnnnnnnnnnnnnnnnnnnnnnnnnnnnnnnnnnnnnnnnnnnnnnnnnnnnnnnnnnnnnnnnnnnnnnnnnnnnnnnnnnnnnnnnnnnnnnnnnnnnnnnnnnnnnnnnnnnnnnnnnnnnnnnnnnnnnnnnnnnnnnnnnnnnnnnnnnnnnnnnnnnnnnnnnnnnnnnnnnnnnnnnnnnnnnnnnnnnnnnnnnnnnnnnnnnnnnnnnnnnnnnnnnnnnnnnnnnnnnnnnnnnnnnnnnnnnnnnnnnnnnnnnnnnnnnnnnnnnnnnnnnnnnnnnnnnnnnnnnnnnnnnnnnnnnnnnnnnnnnnnnnnnnnnnnnnnnnnnnnnnnnnnnnnnnnnnnnnnnnnnnnnnnnnnnnnnnnnnnnnnnnnnnnnnnnnnnnnnnnnnnnnnnnnnnnnnnnnnnnnnnnnnnnnnnnnnnnnnnnnnnnnnnnnnnnnnnnnnnnnnnnnnnnnnnnnnnnnnnnnnnnnnnnnnnnnnnnnnnnnnnnnnnnnnnnnnnnnnnnnnnnnnnnnnnnnnnnnnnnnnnnnnnnnnnnnnnnnnnnnnnnnnnnnnnnnnnnnnnnnnnnnnnnnnnnnnnnnnnnnnnnnnnnnnnnnnnnnnnnnnnnnnnnnnnnnnnnnnnnnnnnnnnnnnnnnnnnnnnnnnnnnnnnnnnnnnnnnnnnnnnnnnnnnnnnnnnnnnnnnnnnnnnnnnnnnnnnnnnnnnnnnnnnnnnnnnnnnnnnnnnnnnnnnnnnnnnnnnnnnnnnnnnnnnnnnnnnnnnnnnnnnnnnnnnnnnnnnnnnnnnnnnnnnnnnnnnnnnnnnnnnnnnnnnnnnnnnnnnnnnnnnnnnnnnnnnnnnnnnnnnnnnnnnnnnnnnnnnnnnnnnnnnnnnnnnnnnnnnnnnnnnnnnnnnnnnnnnnnnnnnnnnnnnnnnnnnnnnnnnnnnnnnnnnnnnnnnnnnnnnnnnnnnnnnnnnnnnnnnnnnnnnnnnnnnnnnnnnnnnnnnnnnnnnnnnnnnnnnnnnnnnnnnnnnnnnnnnnnnnnnnnnnnnnnnnnnnnnnnnnnnnnnnnnnnnnnnnnnnnnnnnnnnnnnnnnnnnnnnnnnnnnnnnnnnnnnnnnnnnnnnnnnnnnnnnnnnnnnnnnnnnnnnnnnnnnnnnnnnnnnnnnnnnnnnnnnnnnnnnnnnnnnnnnnnnnnnnnnnnnnnnnnnnnnnnnnnnnnnnnnnnnnnnnnnnnnnnnnnnnnnnnnnnnnnnnnnnnnnnnnnnnnnnnnnnnnnnnnnnnnnnnnnnnnnnnnnnnnnnnnnnnnnnnnnnnnnnnnnnnnnnnnnnnnnnnnnnnnnnnnnnnnnnnnnnnnnnnnnnnnnnnnnnnnnnnnnnnnnnnnnnnnnnnnnnnnnnnnnnnnnnnnnnnnnnnnnnnnnnnnnnnnnnnnnnnnnnnnnnnnnnnnnnnnnnnnnnnnnnnnnnnnnnnnnnnnnnnnnnnnnnnnnnnnnnnnnnnnnnnnnnnnnnnnnnnnnnnnnnnnnnnnnnnnnnnnnnnnnnnnnnnnnnnnnnnnnnnnnnnnnnnnnnnnnnnnnnnnnnnnnnnnnnnnnnnnnnnnnnnnnnnnnnnnnnnnnnnnnnnnnnnnnnnnnnnnnnnnnnnnnnnnnnnnnnnnnnnnnnnnnnnnnnnnnnnnnnnnnnnnnnnnnnnnnnnnnnnnnnnnnnnnnnnnnnnnnnnnnnnnnnnnnnnnnnnnnnnnnnnnnnnnnnnnnnnnnnnnnnnnnnnnnnnnnnnnnnnnnnnnnnnnnnnnnnnnnnnnnnnnnnnnnnnnnnnnnnnnnnnnnnnnnnnnnnnnnnnnnnnnnnnnnnnnnnnnnnnnnnnnnnnnnnnnnnnnnnnnnnnnnnnnnnnnnnnnnnnnnnnnnnnnnnnnnnnnnnnnnnnnnnnnnnnnnnnnnnnnnnnnnnnnnnnnnnnnnnnnnnnnnnnnnnnnnnnnnnnnnnnnnnnnnnnnnnnnnnnnnnnnnnnnnnnnnnnnnnnnnnnnnnnnnnnnnnnnnnnnnnnnnnnnnnnnnnnnnnnnnnnnnnnnnnnnnnnnnnnnnnnnnnnnnnnnnnnnnnnnnnnnnnnnnnnnnnnnnnnnnnnnnnnnnnnnnnnnnnnnnnnnnnnnnnnnnnnnnnnnnnnnnnnnnnnnnnnnnnnnnnnnnnnnnnnnnnnnnnnnnnnnnnnnnnnnnnnnnnnnnnnnnnnnnnnnnnnnnnnnnnnnnnnnnnnnnnnnnnnnnnnnnnnnnnnnnnnnnnnnnnnnnnnnnnnnnnnnnnnnnnnnnnnnnnnnnnnnnnnnnnnnnnnnnnnnnnnnnnnnnnnnnnnnnnnnnnnnnnnnnnnnnnnnnnnnnnnnnnnnnnnnnnnnnnnnnnnnnnnnnnnnnnnnnnnnnnnnnnnnnnnnnnnnnnnnnnnnnnnnnnnnnnnnnnnnnnnnnnnnnnnnnnnnnnnnnnnnnnnnnnnnnnnnnnnnnnnnnnnnnnnnnnnnnnnnnnnnnnnnnnnnnnnnnnnnnnnnnnnnnnnnnnnnnnnnnnnnnnnnnnnnnnnnnnnnnnnnnnnnnnnnnnnnnnnnnnnnnnnnnnnnnnnnnnnnnnnnnnnnnnnnnnnnnnnnnnnnnnnnnnnnnnnnnnnnnnnnnnnnnnnnnnnnnnnnnnnnnnnnnnnnnnnnnnnnnnnnnnnnnnnnnnnnnnnnnnnnnnnnnnnnnnnnnnnnnnnnnnnnnnnnnnnnnnnnnnnnnnnnnnnnnnnnnnnnnnnnnnnnnnnnnnnnnnnnnnnnnnnnnnnnnnnnnnnnnnnnnnnnnnnnnnnnnnnnnnnnnnnnnnnnnnnnnnnnnnnnnnnnnnnnnnnnnnnnnnnnnnnnnnnnnnnnnnnnnnnnnnnnnnnnnnnnnnnnnnnnnnnnnnnnnnnnnnnnnnnnnnnnnnnnnnnnnnnnnnnnnnnnnnnnnnnnnnnnnnnnnnnnnnnnnnnnnnnnnnnnnnnnnnnnnnnnnnnnnnnnnnnnnnnnnnnnnnnnnnnnnnnnnnnnnnnnnnnnnnnnnnnnnnnnnnnnnnnnnnnnnnnnnnnnnnnnnnnnnnnnnnnnnnnnnnnnnnnnnnnnnnnnnnnnnnnnnnnnnnnnnnnnnnnnnnnnnnnnnnnnnnnnnnnnnnnnnnnnnnnnnnnnnnnnnnnnnnnnnnnnnnnnnnnnnnnnnnnnnnnnnnnnnnnnnnnnnnnnnnnnnnnnnnnnnnnnnnnnnnnnnnnnnnnnnnnnnnnnnnnnnnnnnnnnnnnnnnnnnnnnnnnnnnnnnnnnnnnnnnnnnnnnnnnnnnnnnnnnnnnnnnnnnnnnnnnnnnnnnnnnnnnnnnnnnnnnnnnnnnnnnnnnnnnnnnnnnnnnnnnnnnnnnnnnnnnnnnnnnnnnnnnnnnnnnnnnnnnnnnnnnnnnnnnnnnnnnnnnnnnnnnnnnnnnnnnnnnnnnnnnnnnnnnnnnnnnnnnnnnnnnnnnnnnnnnnnnnnnnnnnnnnnnnnnnnnnnnnnnnnnnnnnnnnnnnnnnnnnnnnnnnnnnnnnnnnnnnnnnnnnnnnnnnnnnnnnnnnnnnnnnnnnnnnnnnnnnnnnnnnnnnnnnnnnnnnnnnnnnnnnnnnnnnnnnnnnnnnnnnnnnnnnnnnnnnnnnnnnnnnnnnnnnnnnnnnnnnnnnnnnnnnnnnnnnnnnnnnnnnnnnnnnnnnnnnnnnnnnnnnnnnnnnnnnnnnnnnnnnnnnnnnnnnnnnnnnnnnnnnnnnnnnnnnnnnnnnnnnnnnnnnnnnnnnnnnnnnnnnnnnnnnnnnnnnnnnnnnnnnnnnnnnnnnnnnnnnnnnnnnnnnnnnnnnnnnnnnnnnnnnnnnnnnnnnnnnnnnnnnnnnnnnnnnnnnnnnnnnnnnnnnnnnnnnnnnnnnnnnnnnnnnnnnnnnnnnnnnnnnnnnnnnnnnnnnnnnnnnnnnnnnnnnnnnnnnnnnnnnnnnnnnnnnnnnnnnnnnnnnnnnnnnnnnnnnnnnnnnnnnnnnnnnnnnnnnnnnnnnnnnnnnnnnnnnnnnnnnnnnnnnnnnnnnnnnnnnnnnnnnnnnnnnnnnnnnnnnnnnnnnnnnnnnnnnnnnnnnnnnnnnnnnnnnnnnnnnnnnnnnnnnnnnnnnnnnnnnnnnnnnnnnnnnnnnnnnnnnnnnnnnnnnnnnnnnnnnnnnnnnnnnnnnnnnnnnnnnnnnnnnnnnnnnnnnnnnnnnnnnnnnnnnnnnnnnnnnnnnnnnnnnnnnnnnnnnnnnnnnnnnnnnnnnnnnnnnnnnnnnnnnnnnnnnnnnnnnnnnnnnnnnnnnnnnnnnnnnnnnnnnnnnnnnnnnnnnnnnnnnnnnnnnnnnnnnnnnnnnnnnnnnnnnnnnnnnnnnnnnnnnnnnnnnnnnnnnnnnnnnnnnnnnnnnnnnnnnnnnnnnnnnnnnnnnnnnnnnnnnnnnnnnnnnnnnnnnnnnnnnnnnnnnnnnnnnnnnnnnnnnnnnnnnnnnnnnnnnnnnnnnnnnnnnnnnnnnnnnnnnnnnnnnnnnnnnnnnnnnnnnnnnnnnnnnnnnnnnnnnnnnnnnnnnnnnnnnnnnnnnnnnnnnnnnnnnnnnnnnnnnnnnnnnnnnnnnnnnnnnnnnnnnnnnnnnnnnnnnnnnnnnnnnnnnnnnnnnnnnnnnnnnnnnnnnnnnnnnnnnnnnnnnnnnnnnnnnnnnnnnnnnnnnnnnnnnnnnnnnnnnnnnnnnnnnnnnnnnnnnnnnnnnnnnnnnnnnnnnnnnnnnnnnnnnnnnnnnnnnnnnnnnnnnnnnnnnnnnnnnnnnnnnnnnnnnnnnnnnnnnnnnnnnnnnnnnnnnnnnnnnnnnnnnnnnnnnnnnnnnnnnnnnnnnnnnnnnnnnnnnnnnnnnnnnnnnnnnnnnnnnnnnnnnnnnnnnnnnnnnnnnnnnnnnnnnnnnnnnnnnnnnnnnnnnnnnnnnnnnnnnnnnnnnnnnnnnnnnnnnnnnnnnnnnnnnnnnnnnnnnnnnnnnnnnnnnnnnnnnnnnnnnnnnnnnnnnnnnnnnnnnnnnnnnnnnnnnnnnnnnnnnnnnnnnnnnnnnnnnnnnnnnnnnnnnnnnnnnnnnnnnnnnnnnnnnnnnnnnnnnnnnnnnnnnnnnnnnnnnnnnnnnnnnnnnnnnnnnnnnnnnnnnnnnnnnnnnnnnnnnnnnnnnnnnnnnnnnnnnnnnnnnnnnnnnnnnnnnnnnnnnnnnnnnnnnnnnnnnnnnnnnnnnnnnnnnnnnnnnnnnnnnnnnnnnnnnnnnnnnnnnnnnnnnnnnnnnnnnnnnnnnnnnnnnnnnnnnnnnnnnnnnnnnnnnnnnnnnnnnnnnnnnnnnnnnnnnnnnnnnnnnnnnnnnnnnnnnnnnnnnnnnnnnnnnnnnnnnnnnnnnnnnnnnnnnnnnnnnnnnnnnnnnnnnnnnnnnnnnnnnnnnnnnnnnnnnnnnnnnnnnnnnnnnnnnnnnnnnnnnnnnnnnnnnnnnnnnnnnnnnnnnnnnnnnnnnnnnnnnnnnnnnnnnnnnnnnnnnnnnnnnnnnnnnnnnnnnnnnnnnnnnnnnnnnnnnnnnnnnnnnnnnnnnnnnnnnnnnnnnnnnnnnnnnnnnnnnnnnnnnnnnnnnnnnnnnnnnnnnnnnnnnnnnnnnnnnnnnnnnnnnnnnnnnnnnnnnnnnnnnnnnnnnnnnnnnnnnnnnnnnnnnnnnnnnnnnnnnnnnnnnnnnnnnnnnnnnnnnnnnnnnnnnnnnnnnnnnnnnnnnnnnnnnnnnnnnnnnnnnnnnnnnnnnnnnnnnnnnnnnnnnnnnnnnnnnnnnnnnnnnnnnnnnnnnnnnnnnnnnnnnnnnnnnnnnnnnnnnnnnnnnnnnnnnnnnnnnnnnnnnnnnnnnnnnnnnnnnnnnnnnnnnnnnnnnnnnnnnnnnnnnnnnnnnnnnnnnnnnnnnnnnnnnnnnnnnnnnnnnnnnnnnnnnnnnnnnnnnnnnnnnnnnnnnnnnnnnnnnnnnnnnnnnnnnnnnnnnnnnnnnnnnnnnnnnnnnnnnnnnnnnnnnnnnnnnnnnnnnnnnnnnnnnnnnnnnnnnnnnnnnnnnnnnnnnnnnnnnnnnnnnnnnnnnnnnnnnnnnnnnnnnnnnnnnnnnnnnnnnnnnnnnnnnnnnnnnnnnnnnnnnnnnnnnnnnnnnnnnnnnnnnnnnnnnnnnnnnnnnnnnnnnnnnnnnnnnnnnnnnnnnnnnnnnnnnnnnnnnnnnnnnnnnnnnnnnnnnnnnnnnnnnnnnnnnnnnnnnnnnnnnnnnnnnnnnnnnnnnnnnnnnnnnnnnnnnnnnnnnnnnnnnnnnnnnnnnnnnnnnnnnnnnnnnnnnnnnnnnnnnnnnnnnnnnnnnnnnnnnnnnnnnnnnnnnnnnnnnnnnnnnnnnnnnnnnnnnnnnnnnnnnnnnnnnnnnnnnnnnnnnnnnnnnnnnnnnnnnnnnnnnnnnnnnnnnnnnnnnnnnnnnnnnnnnnnnnnnnnnnnnnnnnnnnnnnnnnnnnnnnnnnnnnnnnnnnnnnnnnnnnnnnnnnnnnnnnnnnnnnnnnnnnnnnnnnnnnnnnnnnnnnnnnnnnnnnnnnnnnnnnnnnnnnnnnnnnnnnnnnnnnnnnnnnnnnnnnnnnnnnnnnnnnnnnnnnnnnnnnnnnnnnnnnnnnnnnnnnnnnnnnnnnnnnnnnnnnnnnnnnnnnnnnnnnnnnnnnnnnnnnnnnnnnnnnnnnnnnnnnnnnnnnnnnnnnnnnnnnnnnnnnnnnnnnnnnnnnnnnnnnnnnnnnnnnnnnnnnnnnnnnnnnnnnnnnnnnnnnnnnnnnnnnnnnnnnnnnnnnnnnnnnnnnnnnnnnnnnnnnnnnnnnnnnnnnnnnnnnnnnnnnnnnnnnnnnnnnnnnnnnnnnnnnnnnnnnnnnnnnnnnnnnnnnnnnnnnnnnnnnnnnnnnnnnnnnnnnnnnnnnnnnnnnnnnnnnnnnnnnnnnnnnnnnnnnnnnnnnnnnnnnnnnnnnnnnnnnnnnnnnnnnnnnnnnnnnnnnnnnnnnnnnnnnnnnnnnnnnnnnnnnnnnnnnnnnnnnnnnnnnnnnnnnnnnnnnnnnnnnnnnnnnnnnnnnnnnnnnnnnnnnnnnnnnnnnnnnnnnnnnnnnnnnnnnnnnnnnnnnnnnnnnnnnnnnnnnnnnnnnnnnnnnnnnnnnnnnnnnnnnnnnnnnnnnnnnnnnnnnnnnnnnnnnnnnnnnnnnnnnnnnnnnnnnnnnnnnnnnnnnnnnnnnnnnnnnnnnnnnnnnnnnnnnnnnnnnnnnnnnnnnnnnnnnnnnnnnnnnnnnnnnnnnnnnnnnnnnnnnnnnnnnnnnnnnnnnnnnnnnnnnnnnnnnnnnnnnnnnnnnnnnnnnnnnnnnnnnnnnnnnnnnnnnnnnnnnnnnnnnnnnnnnnnnnnnnnnnnnnnnnnnnnnnnnnnnnnnnnnnnnnnnnnnnnnnnnnnnnnnnnnnnnnnnnnnnnnnnnnnnnnnnnnnnnnnnnnnnnnnnnnnnnnnnnnnnnnnnnnnnnnnnnnnnnnnnnnnnnnnnnnnnnnnnnnnnnnnnnnnnnnnnnnnnnnnnnnnnnnnnnnnnnnnnnnnnnnnnnnnnnnnnnnnnnnnnnnnnnnnnnnnnnnnnnnnnnnnnnnnnnnnnnnnnnnnnnnnnnnnnnnnnnnnnnnnnnnnnnnnnnnnnnnnnnnnnnnnnnnnnnnnnnnnnnnnnnnnnnnnnnnnnnnnnnnnnnnnnnnnnnnnnnnnnnnnnnnnnnnnnnnnnnnnnnnnnnnnnnnnnnnnnnnnnnnnnnnnnnnnnnnnnnnnnnnnnnnnnnnnnnnnnnnnnnnnnnnnnnnnnnnnnnnnnnnnnnnnnnnnnnnnnnnnnnnnnnnnnnnnnnnnnnnnnnnnnnnnnnnnnnnnnnnnnnnnnnnnnnnnnnnnnnnnnnnnnnnnnnnnnnnnnnnnnnnnnnnnnnnnnnnnnnnnnnnnnnnnnnnnnnnnnnnnnnnnnnnnnnnnnnnnnnnnnnnnnnnnnnnnnnnnnnnnnnnnnnnnnnnnnnnnnnnnnnnnnnnnnnnnnnnnnnnnnnnnnnnnnnnnnnnnnnnnnnnnnnnnnnnnnnnnnnnnnnnnnnnnnnnnnnnnnnnnnnnnnnnnnnnnnnnnnnnnnnnnnnnnnnnnnnnnnnnnnnnnnnnnnnnnnnnnnnnnnnnnnnnnnnnnnnnnnnnnnnnnnnnnnnnnnnnnnnnnnnnnnnnnnnnnnnnnnnnnnnnnnnnnnnnnnnnnnnnnnnnnnnnnnnnnnnnnnnnnnnnnnnnnnnnnnnnnnnnnnnnnnnnnnnnnnnnnnnnnnnnnnnnnnnnnnnnnnnnnnnnnnnnnnnnnnnnnnnnnnnnnnnnnnnnnnnnnnnnnnnnnnnnnnnnnnnnnnnnnnnnnnnnnnnnnnnnnnnnnnnnnnnnnnnnnnnnnnnnnnnnnnnnnnnnnnnnnnnnnnnnnnnnnnnnnnnnnnnnnnnnnnnnnnnnnnnnnnnnnnnnnnnnnnnnnnnnnnnnnnnnnnnnnnnnnnnnnnnnnnnnnnnnnnnnnnnnnnnnnnnnnnnnnnnnnnnnnnnnnnnnnnnnnnnnnnnnnnnnnnnnnnnnnnnnnnnnnnnnnnnnnnnnnnnnnnnnnnnnnnnnnnnnnnnnnnnnnnnnnnnnnnnnnnnnnnnnnnnnnnnnnnnnnnnnnnnnnnnnnnnnnnnnnnnnnnnnnnnnnnnnnnnnnnnnnnnnnnnnnnnnnnnnnnnnnnnnnnnnnnnnnnnnnnnnnnnnnnnnnnnnnnnnnnnnnnnnnnnnnnnnnnnnnnnnnnnnnnnnnnnnnnnnnnnnnnnnnnnnnnnnnnnnnnnnnnnnnnnnnnnnnnnnnnnnnnnnnnnnnnnnnnnnnnnnnnnnnnnnnnnnnnnnnnnnnnnnnnnnnnnnnnnnnnnnnnnnnnnnnnnnnnnnnnnnnnnnnnnnnnnnnnnnnnnnnnnnnnnnnnnnnnnnnnnnnnnnnnnnnnnnnnnnnnnnnnnnnnnnnnnnnnnnnnnnnnnnnnnnnnnnnnnnnnnnnnnnnnnnnnnnnnnnnnnnnnnnnnnnnnnnnnnnnnnnnnnnnnnnnnnnnnnnnnnnnnnnnnnnnnnnnnnnnnnnnnnnnnnnnnnnnnnnnnnnnnnnnnnnnnnnnnnnnnnnnnnnnnnnnnnnnnnnnnnnnnnnnnnnnnnnnnnnnnnnnnnnnnnnnnnnnnnnnnnnnnnnnnnnnnnnnnnnnnnnnnnnnnnnnnnnnnnnnnnnnnnnnnnnnnnnnnnnnnnnnnnnnnnnnnnnnnnnnnnnnnnnnnnnnnnnnnnnnnnnnnnnnnnnnnnnnnnnnnnnnnnnnnnnnnnnnnnnnnnnnnnnnnnnnnnnnnnnnnnnnnnnnnnnnnnnnnnnnnnnnnnnnnnnnnnnnnnnnnnnnnnnnnnnnnnnnnnnnnnnnnnnnnnnnnnnnnnnnnnnnnnnnnnnnnnnnnnnnnnnnnnnnnnnnnnnnnnnnnnnnnnnnnnnnnnnnnnnnnnnnnnnnnnnnnnnnnnnnnnnnnnnnnnnnnnnnnnnnnnnnnnnnnnnnnnnnnnnnnnnnnnnnnnnnnnnnnnnnnnnnnnnnnnnnnnnnnnnnnnnnnnnnnnnnnnnnnnnnnnnnnnnnnnnnnnnnnnnnnnnnnnnnnnnnnnnnnnnnnnnnnnnnnnnnnnnnnnnnnnnnnnnnnnnnnnnnnnnnnnnnnnnnnnnnnnnnnnnnnnnnnnnnnnnnnnnnnnnnnnnnnnnnnnnnnnnnnnnnnnnnnnnnnnnnnnnnnnnnnnnnnnnnnnnnnnnnnnnnnnnnnnnnnnnnnnnnnnnnnnnnnnnnnnnnnnnnnnnnnnnnnnnnnnnnnnnnnnnnnnnnnnnnnnnnnnnnnnnnnnnnnnnnnnnnnnnnnnnnnnnnnnnnnnnnnnnnnnnnnnnnnnnnnnnnnnnnnnnnnnnnnnnnnnnnnnnnnnnnnnnnnnnnnnnnnnnnnnnnnnnnnnnnnnnnnnnnnnnnnnnnnnnnnnnnnnnnnnnnnnnnnnnnnnnnnnnnnnnnnnnnnnnnnnnnnnnnnnnnnnnnnnnnnnnnnnnnnnnnnnnnnnnnnnnnnnnnnnnnnnnnnnnnnnnnnnnnnnnnnnnnnnnnnnnnnnnnnnnnnnnnnnnnnnnnnnnnnnnnnnnnnnnnnnnnnnnnnnnnnnnnnnnnnnnnnnnnnnnnnnnnnnnnnnnnnnnnnnnnnnnnnnnnnnnnnnnnnnnnnnnnnnnnnnnnnnnnnnnnnnnnnnnnnnnnnnnnnnnnnnnnnnnnnnnnnnnnnnnnnnnnnnnnnnnnnnnnnnnnnnnnnnnnnnnnnnnnnnnnnnnnnnnnnnnnnnnnnnnnnnnnnnnnnnnnnnnnnnnnnnnnnnnnnnnnnnnnnnnnnnnnnnnnnnnnnnnnnnnnnnnnnnnnnnnnnnnnnnnnnnnnnnnnnnnnnnnnnnnnnnnnnnnnnnnnnnnnnnnnnnnnnnnnnnnnnnnnnnnnnnnnnnnnnnnnnnnnnnnnnnnnnnnnnnnnnnnnnnnnnnnnnnnnnnnnnnnnnnnnnnnnnnnnnnnnnnnnnnnnnnnnnnnnnnnnnnnnnnnnnnnnnnnnnnnnnnnnnnnnnnnnnnnnnnnnnnnnnnnnnnnnnnnnnnnnnnnnnnnnnnnnnnnnnnnnnnnnnnnnnnnnnnnnnnnnnnnnnnnnnnnnnnnnnnnnnnnnnnnnnnnnnnnnnnnnnnnnnnnnnnnnnnnnnnnnnnnnnnnnnnnnnnnnnnnnnnnnnnnnnnnnnnnnnnnnnnnnnnnnnnnnnnnnnnnnnnnnnnnnnnnnnnnnnnnnnnnnnnnnnnnnnnnnnnnnnnnnnnnnnnnnnnnnnnnnnnnnnnnnnnnnnnnnnnnnnnnnnnnnnnnnnnnnnnnnnnnnnnnnnnnnnnnnnnnnnnnnnnnnnnnnnnnnnnnnnnnnnnnnnnnnnnnnnnnnnnnnnnnnnnnnnnnnnnnnnnnnnnnnnnnnnnnnnnnnnnnnnnnnnnnnnnnnnnnnnnnnnnnnnnnnnnnnnnnnnnnnnnnnnnnnnnnnnnnnnnnnnnnnnnnnnnnnnnnnnnnnnnnnnnnnnnnnnnnnnnnnnnnnnnnnnnnnnnnnnnnnnnnnnnnnnnnnnnnnnnnnnnnnnnnnnnnnnnnnnnnnnnnnnnnnnnnnnnnnnnnnnnnnnnnnnnnnnnnnnnnnnnnnnnnnnnnnnnnnnnnnnnnnnnnnnnnnnnnnnnnnnnnnnnnnnnnnnnnnnnnnnnnnnnnnnnnnnnnnnnnnnnnnnnnnnnnnnnnnnnnnnnnnnnnnnnnnnnnnnnnnnnnnnnnnnnnnnnnnnnnnnnnnnnnnnnnnnnnnnnnnnnnnnnnnnnnnnnnnnnnnnnnnnnnnnnnnnnnnnnnnnnnnnnnnnnnnnnnnnnnnnnnnnnnnnnnnnnnnnnnnnnnnnnnnnnnnnnnnnnnnnnnnnnnnnnnnnnnnnnnnnnnnnnnnnnnnnnnnnnnnnnnnnnnnnnnnnnnnnnnnnnnnnnnnnnnnnnnnnnnnnnnnnnnnnnnnnnnnnnnnnnnnnnnnnnnnnnnnnnnnnnnnnnnnnnnnnnnnnnnnnnnnnnnnnnnnnnnnnnnnnnnnnnnnnnnnnnnnnnnnnnnnnnnnnnnnnnnnnnnnnnnnnnnnnnnnnnnnnnnnnnnnnnnnnnnnnnnnnnnnnnnnnnnnnnnnnnnnnnnnnnnnnnnnnnnnnnnnnnnnnnnnnnnnnnnnnnnnnnnnnnnnnnnnnnnnnnnnnnnnnnnnnnnnnnnnnnnnnnnnnnnnnnnnnnnnnnnnnnnnnnnnnnnnnnnnnnnnnnnnnnnnnnnnnnnnnnnnnnnnnnnnnnnnnnnnnnnnnnnnnnnnnnnnnnnnnnnnnnnnnnnnnnnnnnnnnnnnnnnnnnnnnnnnnnnnnnnnnnnnnnnnnnnnnnnnnnnnnnnnnnnnnnnnnnnnnnnnnnnnnnnnnnnnnnnnnnnnnnnnnnnnnnnnnnnnnnnnnnnnnnnnnnnnnnnnnnnnnnnnnnnnnnnnnnnnnnnnnnnnnnnnnnnnnnnnnnnnnnnnnnnnnnnnnnnnnnnnnnnnnnnnnnnnnnnnnnnnnnnnnnnnnnnnnnnnnnnnnnnnnnnnnnnnnnnnnnnnnnnnnnnnnnnnnnnnnnnnnnnnnnnnnnnnnnnnnnnnnnnnnnnnnnnnnnnnnnnnnnnnnnnnnnnnnnnnnnnnnnnnnnnnnnnnnnnnnnnnnnnnnnnnnnnnnnnnnnnnnnnnnnnnnnnnnnnnnnnnnnnnnnnnnnnnnnnnnnnnnnnnnnnnnnnnnnnnnnnnnnnnnnnnnnnnnnnnnnnnnnnnnnnnnnnnnnnnnnnnnnnnnnnnnnnnnnnnnnnnnnnnnnnnnnnnnnnnnnnnnnnnnnnnnnnnnnnnnnnnnnnnnnnnnnnnnnnnnnnnnnnnnnnnnnnnnnnnnnnnnnnnnnnnnnnnnnnnnnnnnnnnnnnnnnnnnnnnnnnnnnnnnnnnnnnnnnnnnnnnnnnnnnnnnnnnnnnnnnnnnnnnnnnnnnnnnnnnnnnnnnnnnnnnnnnnnnnnnnnnnnnnnnnnnnnnnnnnnnnnnnnnnnnnnnnnnnnnnnnnnnnnnnnnnnnnnnnnnnnnnnnnnnnnnnnnnnnnnnnnnnnnnnnnnnnnnnnnnnnnnnnnnnnnnnnnnnnnnnnnnnnnnnnnnnnnnnnnnnnnnnnnnnnnnnnnnnnnnnnnnnnnnnnnnnnnnnnnnnnnnnnnnnnnnnnnnnnnnnnnnnnnnnnnnnnnnnnnnnnnnnnnnnnnnnnnnnnnnnnnnnnnnnnnnnnnnnnnnnnnnnnnnnnnnnnnnnnnnnnnnnnnnnnnnnnnnnnnnnnnnnnnnnnnnnnnnnnnnnnnnnnnnnnnnnnnnnnnnnnnnnnnnnnnnnnnnnnnnnnnnnnnnnnnnnnnnnnnnnnnnnnnnnnnnnnnnnnnnnnnnnnnnnnnnnnnnnnnnnnnnnnnnnnnnnnnnnnnnnnnnnnnnnnnnnnnnnnnnnnnnnnnnnnnnnnnnnnnnnnnnnnnnnnnnnnnnnnnnnnnnnnnnnnnnnnnnnnnnnnnnnnnnnnnnnnnnnnnnnnnnnnnnnnnnnnnnnnnnnnnnnnnnnnnnnnnnnnnnnnnnnnnnnnnnnnnnnnnnnnnnnnnnnnnnnnnnnnnnnnnnnnnnnnnnnnnnnnnnnnnnnnnnnnnnnnnnnnnnnnnnnnnnnnnnnnnnnnnnnnnnnnnnnnnnnnnnnnnnnnnnnnnnnnnnnnnnnnnnnnnnnnnnnnnnnnnnnnnnnnnnnnnnnnnnnnnnnnnnnnnnnnnnnnnnnnnnnnnnnnnnnnnnnnnnnnnnnnnnnnnnnnnnnnnnnnnnnnnnnnnnnnnnnnnnnnnnnnnnnnnnnnnnnnnnnnnnnnnnnnnnnnnnnnnnnnnnnnnnnnnnnnnnnnnnnnnnnnnnnnnnnnnnnnnnnnnnnnnnnnnnnnnnnnnnnnnnnnnnnnnnnnnnnnnnnnnnnnnnnnnnnnnnnnnnnnnnnnnnnnnnnnnnnnnnnnnnnnnnnnnnnnnnnnnnnnnnnnnnnnnnnnnnnnnnnnnnnnnnnnnnnnnnnnnnnnnnnnnnnnnnnnnnnnnnnnnnnnnnnnnnnnnnnnnnnnnnnnnnnnnnnnnnnnnnnnnnnnnnnnnnnnnnnnnnnnnnnnnnnnnnnnnnnnnnnnnnnnnnnnnnnnnnnnnnnnnnnnnnnnnnnnnnnnnnnnnnnnnnnnnnnnnnnnnnnnnnnnnnnnnnnnnnnnnnnnnnnnnnnnnnnnnnnnnnnnnnnnnnnnnnnnnnnnnnnnnnnnnnnnnnnnnnnnnnnnnnnnnnnnnnnnnnnnnnnnnnnnnnnnnnnnnnnnnnnnnnnnnnnnnnnnnnnnnnnnnnnnnnnnnnnnnnnnnnnnnnnnnnnnnnnnnnnnnnnnnnnnnnnnnnnnnnnnnnnnnnnnnnnnnnnnnnnnnnnnnnnnnnnnnnnnnnnnnnnnnnnnnnnnnnnnnnnnnnnnnnnnnnnnnnnnnnnnnnnnnnnnnnnnnnnnnnnnnnnnnnnnnnnnnnnnnnnnnnnnnnnnnnnnnnnnnnnnnnnnnnnnnnnnnnnnnnnnnnnnnnnnnnnnnnnnnnnnnnnnnnnnnnnnnnnnnnnnnnnnnnnnnnnnnnnnnnnnnnnnnnnnnnnnnnnnnnnnnnnnnnnnnnnnnnnnnnnnnnnnnnnnnnnnnnnnnnnnnnnnnnnnnnnnnnnnnnnnnnnnnnnnnnnnnnnnnnnnnnnnnnnnnnnnnnnnnnnnnnnnnnnnnnnnnnnnnnnnnnnnnnnnnnnnnnnnnnnnnnnnnnnnnnnnnnnnnnnnnnnnnnnnnnnnnnnnnnnnnnnnnnnnnnnnnnnnnnnnnnnnnnnnnnnnnnnnnnnnnnnnnnnnnnnnnnnnnnnnnnnnnnnnnnnnnnnnnnnnnnnnnnnnnnnnnnnnnnnnnnnnnnnnnnnnnnnnnnnnnnnnnnnnnnnnnnnnnnnnnnnnnnnnnnnnnnnnnnnnnnnnnnnnnnnnnnnnnnnnnnnnnnnnnnnnnnnnnnnnnnnnnnnnnnnnnnnnnnnnnnnnnnnnnnnnnnnnnnnnnnnnnnnnnnnnnnnnnnnnnnnnnnnnnnnnnnnnnnnnnnnnnnnnnnnnnnnnnnnnnnnnnnnnnnnnnnnnnnnnnnnnnnnnnnnnnnnnnnnnnnnnnnnnnnnnnnnnnnnnnnnnnnnnnnnnnnnnnnnnnnnnnnnnnnnnnnnnnnnnnnnnnnnnnnnnnnnnnnnnnnnnnnnnnnnnnnnnnnnnnnnnnnnnnnnnnnnnnnnnnnnnnnnnnnnnnnnnnnnnnnnnnnnnnnnnnnnnnnnnnnnnnnnnnnnnnnnnnnnnnnnnnnnnnnnnnnnnnnnnnnnnnnnnnnnnnnnnnnnnnnnnnnnnnnnnnnnnnnnnnnnnnnnnnnnnnnnnnnnnnnnnnnnnnnnnnnnnnnnnnnnnnnnnnnnnnnnnnnnnnnnnnnnnnnnnnnnnnnnnnnnnnnnnnnnnnnnnnnnnnnnnnnnnnnnnnnnnnnnnnnnnnnnnnnnnnnnnnnnnnnnnnnnnnnnnnnnnnnnnnnnnnnnnnnnnnnnnnnnnnnnnnnnnnnnnnnnnnnnnnnnnnnnnnnnnnnnnnnnnnnnnnnnnnnnnnnnnnnnnnnnnnnnnnnnnnnnnnnnnnnnnnnnnnnnnnnnnnnnnnnnnnnnnnnnnnnnnnnnnnnnnnnnnnnnnnnnnnnnnnnnnnnnnnnnnnnnnnnnnnnnnnnnnnnnnnnnnnnnnnnnnnnnnnnnnnnnnnnnnnnnnnnnnnnnnnnnnnnnnnnnnnnnnnnnnnnnnnnnnnnnnnnnnnnnnnnnnnnnnnnnnnnnnnnnnnnnnnnnnnnnnnnnnnnnnnnnnnnnnnnnnnnnnnnnnnnnnnnnnnnnnnnnnnnnnnnnnnnnnnnnnnnnnnnnnnnnnnnnnnnnnnnnnnnnnnnnnnnnnnnnnnnnnnnnnnnnnnnnnnnnnnnnnnnnnnnnnnnnnnnnnnnnnnnnnnnnnnnnnnnnnnnnnnnnnnnnnnnnnnnnnnnnnnnnnnnnnnnnnnnnnnnnnnnnnnnnnnnnnnnnnnnnnnnnnnnnnnnnnnnnnnnnnnnnnnnnnnnnnnnnnnnnnnnnnnnnnnnnnnnnnnnnnnnnnnnnnnnnnnnnnnnnnnnnnnnnnnnnnnnnnnnnnnnnnnnnnnnnnnnnnnnnnnnnnnnnnnnnnnnnnnnnnnnnnnnnnnnnnnnnnnnnnnnnnnnnnnnnnnnnnnnnnnnnnnnnnnnnnnnnnnnnnnnnnnnnnnnnnnnnnnnnnnnnnnnnnnnnnnnnnnnnnnnnnnnnnnnnnnnnnnnnnnnnnnnnnnnnnnnnnnnnnnnnnnnnnnnnnnnnnnnnnnnnnnnnnnnnnnnnnnnnnnnnnnnnnnnnnnnnnnnnnnnnnnnnnnnnnnnnnnnnnnnnnnnnnnnnnnnnnnnnnnnnnnnnnnnnnnnnnnnnnnnnnnnnnnnnnnnnnnnnnnnnnnnnnnnnnnnnnnnnnnnnnnnnnnnnnnnnnnnnnnnnnnnnnnnnnnnnnnnnnnnnnnnnnnnnnnnnnnnnnnnnnnnnnnnnnnnnnnnnnnnnnnnnnnnnnnnnnnnnnnnnnnnnnnnnnnnnnnnnnnnnnnnnnnnnnnnnnnnnnnnnnnnnnnnnnnnnnnnnnnnnnnnnnnnnnnnnnnnnnnnnnnnnnnnnnnnnnnnnnnnnnnnnnnnnnnnnnnnnnnnnnnnnnnnnnnnnnnnnnnnnnnnnnnnnnnnnnnnnnnnnnnnnnnnnnnnnnnnnnnnnnnnnnnnnnnnnnnnnnnnnnnnnnnnnnnnnnnnnnnnnnnnnnnnnnnnnnnnnnnnnnnnnnnnnnnnnnnnnnnnnnnnnnnnnnnnnnnnnnnnnnnnnnnnnnnnnnnnnnnnnnnnnnnnnnnnnnnnnnnnnnnnnnnnnnnnnnnnnnnnnnnnnnnnnnnnnnnnnnnnnnnnnnnnnnnnnnnnnnnnnnnnnnnnnnnnnnnnnnnnnnnnnnnnnnnnnnnnnnnnnnnnnnnnnnnnnnnnnnnnnnnnnnnnnnnnnnnnnnnnnnnnnnnnnnnnnnnnnnnnnnnnnnnnnnnnnnnnnnnnnnnnnnnnnnnnnnnnnnnnnnnnnnnnnnnnnnnnnnnnnnnnnnnnnnnnnnnnnnnnnnnnnnnnnnnnnnnnnnnnnnnnnnnnnnnnnnnnnnnnnnnnnnnnnnnnnnnnnnnnnnnnnnnnnnnnnnnnnnnnnnnnnnnnnnnnnnnnnnnnnnnnnnnnnnnnnnnnnnnnnnnnnnnnnnnnnnnnnnnnnnnnnnnnnnnnnnnnnnnnnnnnnnnnnnnnnnnnnnnnnnnnnnnnnnnnnnnnnnnnnnnnnnnnnnnnnnnnnnnnnnnnnnnnnnnnnnnnnnnnnnnnnnnnnnnnnnnnnnnnnnnnnnnnnnnnnnnnnnnnnnnnnnnnnnnnnnnnnnnnnnnnnnnnnnnnnnnnnnnnnnnnnnnnnnnnnnnnnnnnnnnnnnnnnnnnnnnnnnnnnnnnnnnnnnnnnnnnnnnnnnnnnnnnnnnnnnnnnnnnnnnnnnnnnnnnnnnnnnnnnnnnnnnnnnnnnnnnnnnnnnnnnnnnnnnnnnnnnnnnnnnnnnnnnnnnnnnnnnnnnnnnnnnnnnnnnnnnnnnnnnnnnnnnnnnnnnnnnnnnnnnnnnnnnnnnnnnnnnnnnnnnnnnnnnnnnnnnnnnnnnnnnnnnnnnnnnnnnnnnnnnnnnnnnnnnnnnnnnnnnnnnnnnnnnnnnnnnnnnnnnnnnnnnnnnnnnnnnnnnnnnnnnnnnnnnnnnnnnnnnnnnnnnnnnnnnnnnnnnnnnnnnnnnnnnnnnnnnnnnnnnnnnnnnnnnnnnnnnnnnnnnnnnnnnnnnnnnnnnnnnnnnnnnnnnnnnnnnnnnnnnnnnnnnnnnnnnnnnnnnnnnnnnnnnnnnnnnnnnnnnnnnnnnnnnnnnnnnnnnnnnnnnnnnnnnnnnnnnnnnnnnnnnnnnnnnnnnnnnnnnnnnnnnnnnnnnnnnnnnnnnnnnnnnnnnnnnnnnnnnnnnnnnnnnnnnnnnnnnnnnnnnnnnnnnnnnnnnnnnnnnnnnnnnnnnnnnnnnnnnnnnnnnnnnnnnnnnnnnnnnnnnnnnnnnnnnnnnnnnnnnnnnnnnnnnnnnnnnnnnnnnnnnnnnnnnnnnnnnnnnnnnnnnnnnnnnnnnnnnnnnnnnnnnnnnnnnnnnnnnnnnnnnnnnnnnnnnnnnnnnnnnnnnnnnnnnnnnnnnnnnnnnnnnnnnnnnnnnnnnnnnnnnnnnnnnnnnnnnnnnnnnnnnnnnnnnnnnnnnnnnnnnnnnnnnnnnnnnnnnnnnnnnnnnnnnnnnnnnnnnnnnnnnnnnnnnnnnnnnnnnnnnnnnnnnnnnnnnnnnnnnnnnnnnnnnnnnnnnnnnnnnnnnnnnnnnnnnnnnnnnnnnnnnnnnnnnnnnnnnnnnnnnnnnnnnnnnnnnnnnnnnnnnnnnnnnnnnnnnnnnnnnnnnnnnnnnnnnnnnnnnnnnnnnnnnnnnnnnnnnnnnnnnnnnnnnnnnnnnnnnnnnnnnnnnnnnnnnnnnnnnnnnnnnnnnnnnnnnnnnnnnnnnnnnnnnnnnnnnnnnnnnnnnnnnnnnnnnnnnnnnnnnnnnnnnnnnnnnnnnnnnnnnnnnnnnnnnnnnnnnnnnnnnnnnnnnnnnnnnnnnnnnnnnnnnnnnnnnnnnnnnnnnnnnnnnnnnnnnnnnnnnnnnnnnnnnnnnnnnnnnnnnnnnnnnnnnnnnnnnnnnnnnnnnnnnnnnnnnnnnnnnnnnnnnnnnnnnnnnnnnnnnnnnnnnnnnnnnnnnnnnnnnnnnnnnnnnnnnnnnnnnnnnnnnnnnnnnnnnnnnnnnnnnnnnnnnnnnnnnnnnnnnnnnnnnnnnnnnnnnnnnnnnnnnnnnnnnnnnnnnnnnnnnnnnnnnnnnnnnnnnnnnnnnnnnnnnnnnnnnnnnnnnnnnnnnnnnnnnnnnnnnnnnnnnnnnnnnnnnnnnnnnnnnnnnnnnnnnnnnnnnnnnnnnnnnnnnnnnnnnnnnnnnnnnnnnnnnnnnnnnnnnnnnnnnnnnnnnnnnnnnnnnnnnnnnnnnnnnnnnnnnnnnnnnnnnnnnnnnnnnnnnnnnnnnnnnnnnnnnnnnnnnnnnnnnnnnnnnnnnnnnnnnnnnnnnnnnnnnnnnnnnnnnnnnnnnnnnnnnnnnnnnnnnnnnnnnnnnnnnnnnnnnnnnnnnnnnnnnnnnnnnnnnnnnnnnnnnnnnnnnnnnnnnnnnnnnnnnnnnnnnnnnnnnnnnnnnnnnnnnnnnnnnnnnnnnnnnnnnnnnnnnnnnnnnnnnnnnnnnnnnnnnnnnnnnnnnnnnnnnnnnnnnnnnnnnnnnnnnnnnnnnnnnnnnnnnnnnnnnnnnnnnnnnnnnnnnnnnnnnnnnnnnnnnnnnnnnnnnnnnnnnnnnnnnnnnnnnnnnnnnnnnnnnnnnnnnnnnnnnnnnnnnnnnnnnnnnnnnnnnnnnnnnnnnnnnnnnnnnnnnnnnnnnnnnnnnnnnnnnnnnnnnnnnnnnnnnnnnnnnnnnnnnnnnnnnnnnnnnnnnnnnnnnnnnnnnnnnnnnnnnnnnnnnnnnnnnnnnnnnnnnnnnnnnnnnnnnnnnnnnnnnnnnnnnnnnnnnnnnnnnnnnnnnnnnnnnnnnnnnnnnnnnnnnnnnnnnnnnnnnnnnnnnnnnnnnnnnnnnnnnnnnnnnnnnnnnnnnnnnnnnnnnnnnnnnnnnnnnnnnnnnnnnnnnnnnnnnnnnnnnnnnnnnnnnnnnnnnnnnnnnnnnnnnnnnnnnnnnnnnnnnnnnnnnnnnnnnnnnnnnnnnnnnnnnnnnnnnnnnnnnnnnnnnnnnnnnnnnnnnnnnnnnnnnnnnnnnnnnnnnnnnnnnnnnnnnnnnnnnnnnnnnnnnnnnnnnnnnnnnnnnnnnnnnnnnnnnnnnnnnnnnnnnnnnnnnnnnnnnnnnnnnnnnnnnnnnnnnnnnnnnnnnnnnnnnnnnnnnnnnnnnnnnnnnnnnnnnnnnnnnnnnnnnnnnnnnnnnnnnnnnnnnnnnnnnnnnnnnnnnnnnnnnnnnnnnnnnnnnnnnnnnnnnnnnnnnnnnnnnnnnnnnnnnnnnnnnnnnnnnnnnnnnnnnnnnnnnnnnnnnnnnnnnnnnnnnnnnnnnnnnnnnnnnnnnnnnnnnnnnnnnnnnnnnnnnnnnnnnnnnnnnnnnnnnnnnnnnnnnnnnnnnnnnnnnnnnnnnnnnnnnnnnnnnnnnnnnnnnnnnnnnnnnnnnnnnnnnnnnnnnnnnnnnnnnnnnnnnnnnnnnnnnnnnnnnnnnnnnnnnnnnnnnnnnnnnnnnnnnnnnnnnnnnnnnnnnnnnnnnnnnnnnnnnnnnnnnnnnnnnnnnnnnnnnnnnnnnnnnnnnnnnnnnnnnnnnnnnnnnnnnnnnnnnnnnnnnnnnnnnnnnnnnnnnnnnnnnnnnnnnnnnnnnnnnnnnnnnnnnnnnnnnnnnnnnnnnnnnnnnnnnnnnnnnnnnnnnnnnnnnnnnnnnnnnnnnnnnnnnnnnnnnnnnnnnnnnnnnnnnnnnnnnnnnnnnnnnnnnnnnnnnnnnnnnnnnnnnnnnnnnnnnnnnnnnnnnnnnnnnnnnnnnnnnnnnnnnnnnnnnnnnnnnnnnnnnnnnnnnnnnnnnnnnnnnnnnnnnnnnnnnnnnnnnnnnnnnnnnnnnnnnnnnnnnnnnnnnnnnnnnnnnnnnnnnnnnnnnnnnnnnnnnnnnnnnnnnnnnnnnnnnnnnnnnnnnnnnnnnnnnnnnnnnnnnnnnnnnnnnnnnnnnnnnnnnnnnnnnnnnnnnnnnnnnnnnnnnnnnnnnnnnnnnnnnnnnnnnnnnnnnnnnnnnnnnnnnnnnnnnnnnnnnnnnnnnnnnnnnnnnnnnnnnnnnnnnnnnnnnnnnnnnnnnnnnnnnnnnnnnnnnnnnnnnnnnnnnnnnnnnnnnnnnnnnnnnnnnnnnnnnnnnnnnnnnnnnnnnnnnnnnnnnnnnnnnnnnnnnnnnnnnnnnnnnnnnnnnnnnnnnnnnnnnnnnnnnnnnnnnnnnnnnnnnnnnnnnnnnnnnnnnnnnnnnnnnnnnnnnnnnnnnnnnnnnnnnnnnnnnnnnnnnnnnnnnnnnnnnnnnnnnnnnnnnnnnnnnnnnnnnnnnnnnnnnnnnnnnnnnnnnnnnnnnnnnnnnnnnnnnnnnnnnnnnnnnnnnnnnnnnnnnnnnnnnnnnnnnnnnnnnnnnnnnnnnnnnnnnnnnnnnnnnnnnnnnnnnnnnnnnnnnnnnnnnnnnnnnnnnnnnnnnnnnnnnnnnnnnnnnnnnnnnnnnnnnnnnnnnnnnnnnnnnnnnnnnnnnnnnnnnnnnnnnnnnnnnnnnnnnnnnnnnnnnnnnnnnnnnnnnnnnnnnnnnnnnnnnnnnnnnnnnnnnnnnnnnnnnnnnnnnnnnnnnnnnnnnnnnnnnnnnnnnnnnnnnnnnnnnnnnnnnnnnnnnnnnnnnnnnnnnnnnnnnnnnnnnnnnnnnnnnnnnnnnnnnnnnnnnnnnnnnnnnnnnnnnnnnnnnnnnnnnnnnnnnnnnnnnnnnnnnnnnnnnnnnnnnnnnnnnnnnnnnnnnnnnnnnnnnnnnnnnnnnnnnnnnnnnnnnnnnnnnnnnnnnnnnnnnnnnnnnnnnnnnnnnnnnnnnnnnnnnnnnnnnnnnnnnnnnnnnnnnnnnnnnnnnnnnnnnnnnnnnnnnnnnnnnnnnnnnnnnnnnnnnnnnnnnnnnnnnnnnnnnnnnnnnnnnnnnnnnnnnnnnnnnnnnnnnnnnnnnnnnnnnnnnnnnnnnnnnnnnnnnnnnnnnnnnnnnnnnnnnnnnnnnnnnnnnnnnnnnnnnnnnnnnnnnnnnnnnnnnnnnnnnnnnnnnnnnnnnnnnnnnnnnnnnnnnnnnnnnnnnnnnnnnnnnnnnnnnnnnnnnnnnnnnnnnnnnnnnnnnnnnnnnnnnnnnnnnnnnnnnnnnnnnnnnnnnnnnnnnnnnnnnnnnnnnnnnnnnnnnnnnnnnnnnnnnnnnnnnnnnnnnnnnnnnnnnnnnnnnnnnnnnnnnnnnnnnnnnnnnnnnnnnnnnnnnnnnnnnnnnnnnnnnnnnnnnnnnnnnnnnnnnnnnnnnnnnnnnnnnnnnnnnnnnnnnnnnnnnnnnnnnnnnnnnnnnnnnnnnnnnnnnnnnnnnnnnnnnnnnnnnnnnnnnnnnnnnnnnnnnnnnnnnnnnnnnnnnnnnnnnnnnnnnnnnnnnnnnnnnnnnnnnnnnnnnnnnnnnnnnnnnnnnnnnnnnnnnnnnnnnnnnnnnnnnnnnnnnnnnnnnnnnnnnnnnnnnnnnnnnnnnnnnnnnnnnnnnnnnnnnnnnnnnnnnnnnnnnnnnnnnnnnnnnnnnnnnnnnnnnnnnnnnnnnnnnnnnnnnnnnnnnnnnnnnnnnnnnnnnnnnnnnnnnnnnnnnnnnnnnnnnnnnnnnnnnnnnnnnnnnnnnnnnnnnnnnnnnnnnnnnnnnnnnnnnnnnnnnnnnnnnnnnnnnnnnnnnnnnnnnnnnnnnnnnnnnnnnnnnnnnnnnnnnnnnnnnnnnnnnnnnnnnnnnnnnnnnnnnnnnnnnnnnnnnnnnnnnnnnnnnnnnnnnnnnnnnnnnnnnnnnnnnnnnnnnnnnnnnnnnnnnnnnnnnnnnnnnnnnnnnnnnnnnnnnnnnnnnnnnnnnnnnnnnnnnnnnnnnnnnnnnnnnnnnnnnnnnnnnnnnnnnnnnnnnnnnnnnnnnnnnnnnnnnnnnnnnnnnnnnnnnnnnnnnnnnnnnnnnnnnnnnnnnnnnnnnnnnnnnnnnnnnnnnnnnnnnnnnnnnnnnnnnnnnnnnnnnnnnnnnnnnnnnnnnnnnnnnnnnnnnnnnnnnnnnnnnnnnnnnnnnnnnnnnnnnnnnnnnnnnnnnnnnnnnnnnnnnnnnnnnnnnnnnnnnnnnnnnnnnnnnnnnnnnnnnnnnnnnnnnnnnnnnnnnnnnnnnnnnnnnnnnnnnnnnnnnnnnnnnnnnnnnnnnnnnnnnnnnnnnnnnnnnnnnnnnnnnnnnnnnnnnnnnnnnnnnnnnnnnnnnnnnnnnnnnnnnnnnnnnnnnnnnnnnnnnnnnnnnnnnnnnnnnnnnnnnnnnnnnnnnnnnnnnnnnnnnnnnnnnnnnnnnnnnnnnnnnnnnnnnnnnnnnnnnnnnnnnnnnnnnnnnnnnnnnnnnnnnnnnnnnnnnnnnnnnnnnnnnnnnnnnnnnnnnnnnnnnnnnnnnnnnnnnnnnnnnnnnnnnnnnnnnnnnnnnnnnnnnnnnnnnnnnnnnnnnnnnnnnnnnnnnnnnnnnnnnnnnnnnnnnnnnnnnnnnnnnnnnnnnnnnnnnnnnnnnnnnnnnnnnnnnnnnnnnnnnnnnnnnnnnnnnnnnnnnnnnnnnnnnnnnnnnnnnnnnnnnnnnnnnnnnnnnnnnnnnnnnnnnnnnnnnnnnnnnnnnnnnnnnnnnnnnnnnnnnnnnnnnnnnnnnnnnnnnnnnnnnnnnnnnnnnnnnnnnnnnnnnnnnnnnnnnnnnnnnnnnnnnnnnnnnnnnnnnnnnnnnnnnnnnnnnnnnnnnnnnnnnnnnnnnnnnnnnnnnnnnnnnnnnnnnnnnnnnnnnnnnnnnnnnnnnnnnnnnnnnnnnnnnnnnnnnnnnnnnnnnnnnnnnnnnnnnnnnnnnnnnnnnnnnnnnnnnnnnnnnnnnnnnnnnnnnnnnnnnnnnnnnnnnnnnnnnnnnnnnnnnnnnnnnnnnnnnnnnnnnnnnnnnnnnnnnnnnnnnnnnnnnnnnnnnnnnnnnnnnnnnnnnnnnnnnnnnnnnnnnnnnnnnnnnnnnnnnnnnnnnnnnnnnnnnnnnnnnnnnnnnnnnnnnnnnnnnnnnnnnnnnnnnnnnnnnnnnnnnnnnnnnnnnnnnnnnnnnnnnnnnnnnnnnnnnnnnnnnnnnnnnnnnnnnnnnnnnnnnnnnnnnnnnnnnnnnnnnnnnnnnnnnnnnnnnnnnnnnnnnnnnnnnnnnnnnnnnnnnnnnnnnnnnnnnnnnnnnnnnnnnnnnnnnnnnnnnnnnnnnnnnnnnnnnnnnnnnnnnnnnnnnnnnnnnnnnnnnnnnnnnnnnnnnnnnnnnnnnnnnnnnnnnnnnnnnnnnnnnnnnnnnnnnnnnnnnnnnnnnnnnnnnnnnnnnnnnnnnnnnnnnnnnnnnnnnnnnnnnnnnnnnnnnnnnnnnnnnnnnnnnnnnnnnnnnnnnnnnnnnnnnnnnnnnnnnnnnnnnnnnnnnnnnnnnnnnnnnnnnnnnnnnnnnnnnnnnnnnnnnnnnnnnnnnnnnnnnnnnnnnnnnnnnnnnnnnnnnnnnnnnnnnnnnnnnnnnnnnnnnnnnnnnnnnnnnnnnnnnnnnnnnnnnnnnnnnnnnnnnnnnnnnnnnnnnnnnnnnnnnnnnnnnnnnnnnnnnnnnnnnnnnnnnnnnnnnnnnnnnnnnnnnnnnnnnnnnnnnnnnnnnnnnnnnnnnnnnnnnnnnnnnnnnnnnnnnnnnnnnnnnnnnnnnnnnnnnnnnnnnnnnnnnnnnnnnnnnnnnnnnnnnnnnnnnnnnnnnnnnnnnnnnnnnnnnnnnnnnnnnnnnnnnnnnnnnnnnnnnnnnnnnnnnnnnnnnnnnnnnnnnnnnnnnnnnnnnnnnnnnnnnnnnnnnnnnnnnnnnnnnnnnnnnnnnnnnnnnnnnnnnnnnnnnnnnnnnnnnnnnnnnnnnnnnnnnnnnnnnnnnnnnnnnnnnnnnnnnnnnnnnnnnnnnnnnnnnnnnnnnnnnnnnnnnnnnnnnnnnnnnnnnnnnnnnnnnnnnnnnnnnnnnnnnnnnnnnnnnnnnnnnnnnnnnnnnnnnnnnnnnnnnnnnnnnnnnnnnnnnnnnnnnnnnnnnnnnnnnnnnnnnnnnnnnnnnnnnnnnnnnnnnnnnnnnnnnnnnnnnnnnnnnnnnnnnnnnnnnnnnnnnnnnnnnnnnnnnnnnnnnnnnnnnnnnnnnnnnnnnnnnnnnnnnnnnnnnnnnnnnnnnnnnnnnnnnnnnnnnnnnnnnnnnnnnnnnnnnnnnnnnnnnnnnnnnnnnnnnnnnnnnnnnnnnnnnnnnnnnnnnnnnnnnnnnnnnnnnnnnnnnnnnnnnnnnnnnnnnnnnnnnnnnnnnnnnnnnnnnnnnnnnnnnnnnnnnnnnnnnnnnnnnnnnnnnnnnnnnnnnnnnnnnnnnnnnnnnnnnnnnnnnnnnnnnnnnnnnnnnnnnnnnnnnnnnnnnnnnnnnnnnnnnnnnnnnnnnnnnnnnnnnnnnnnnnnnnnnnnnnnnnnnnnnnnnnnnnnnnnnnnnnnnnnnnnnnnnnnnnnnnnnnnnnnnnnnnnnnnnnnnnnnnnnnnnnnnnnnnnnnnnnnnnnnnnnnnnnnnnnnnnnnnnnnnnnnnnnnnnnnnnnnnnnnnnnnnnnnnnnnnnnnnnnnnnnnnnnnnnnnnnnnnnnnnnnnnnnnnnnnnnnnnnnnnnnnnnnnnnnnnnnnnnnnnnnnnnnnnnnnnnnnnnnnnnnnnnnnnnnnnnnnnnnnnnnnnnnnnnnnnnnnnnnnnnnnnnnnnnnnnnnnnnnnnnnnnnnnnnnnnnnnnnnnnnnnnnnnnnnnnnnnnnnnnnnnnnnnnnnnnnnnnnnnnnnnnnnnnnnnnnnnnnnnnnnnnnnnnnnnnnnnnnnnnnnnnnnnnnnnnnnnnnnnnnnnnnnnnnnnnnnnnnnnnnnnnnnnnnnnnnnnnnnnnnnnnnnnnnnnnnnnnnnnnnnnnnnnnnnnnnnnnnnnnnnnnnnnnnnnnnnnnnnnnnnnnnnnnnnnnnnnnnnnnnnnnnnnnnnnnnnnnnnnnnnnnnnnnnnnnnnnnnnnnnnnnnnnnnnnnnnnnnnnnnnnnnnnnnnnnnnnnnnnnnnnnnnnnnnnnnnnnnnnnnnnnnnnnnnnnnnnnnnnnnnnnnnnnnnnnnnnnnnnnnnnnnnnnnnnnnnnnnnnnnnnnnnnnnnnnnnnnnnnnnnnnnnnnnnnnnnnnnnnnnnnnnnnnnnnnnnnnnnnnnnnnnnnnnnnnnnnnnnnnnnnnnnnnnnnnnnnnnnnnnnnnnnnnnnnnnnnnnnnnnnnnnnnnnnnnnnnnnnnnnnnnnnnnnnnnnnnnnnnnnnnnnnnnnnnnnnnnnnnnnnnnnnnnnnnnnnnnnnnnnnnnnnnnnnnnnnnnnnnnnnnnnnnnnnnnnnnnnnnnnnnnnnnnnnnnnnnnnnnnnnnnnnnnnnnnnnnnnnnnnnnnnnnnnnnnnnnnnnnnnnnnnnnnnnnnnnnnnnnnnnnnnnnnnnnnnnnnnnnnnnnnnnnnnnnnnnnnnnnnnnnnnnnnnnnnnnnnnnnnnnnnnnnnnnnnnnnnnnnnnnnnnnnnnnnnnnnnnnnnnnnnnnnnnnnnnnnnnnnnnnnnnnnnnnnnnnnnnnnnnnnnnnnnnnnnnnnnnnnnnnnnnnnnnnnnnnnnnnnnnnnnnnnnnnnnnnnnnnnnnnnnnnnnnnnnnnnnnnnnnnnnnnnnnnnnnnnnnnnnnnnnnnnnnnnnnnnnnnnnnnnnnnnnnnnnnnnnnnnnnnnnnnnnnnnnnnnnnnnnnnnnnnnnnnnnnnnnnnnnnnnnnnnnnnnnnnnnnnnnnnnnnnnnnnnnnnnnnnnnnnnnnnnnnnnnnnnnnnnnnnnnnnnnnnnnnnnnnnnnnnnnnnnnnnnnnnnnnnnnnnnnnnnnnnnnnnnnnnnnnnnnnnnnnnnnnnnnnnnnnnnnnnnnnnnnnnnnnnnnnnnnnnnnnnnnnnnnnnnnnnnnnnnnnnnnnnnnnnnnnnnnnnnnnnnnnnnnnnnnnnnnnnnnnnnnnnnnnnnnnnnnnnnnnnnnnnnnnnnnnnnnnnnnnnnnnnnnnnnnnnnnnnnnnnnnnnnnnnnnnnnnnnnnnnnnnnnnnnnnnnnnnnnnnnnnnnnnnnnnnnnnnnnnnnnnnnnnnnnnnnnnnnnnnnnnnnnnnnnnnnnnnnnnnnnnnnnnnnnnnnnnnnnnnnnnnnnnnnnnnnnnnnnnnnnnnnnnnnnnnnnnnnnnnnnnnnnnnnnnnnnnnnnnnnnnnnnnnnnnnnnnnnnnnnnnnnnnnnnnnnnnnnnnnnnnnnnnnnnnnnnnnnnnnnnnnnnnnnnnnnnnnnnnnnnnnnnnnnnnnnnnnnnnnnnnnnnnnnnnnnnnnnnnnnnnnnnnnnnnnnnnnnnnnnnnnnnnnnnnnnnnnnnnnnnnnnnnnnnnnnnnnnnnnnnnnnnnnnnnnnnnnnnnnnnnnnnnnnnnnnnnnnnnnnnnnnnnnnnnnnnnnnnnnnnnnnnnnnnnnnnnnnnnnnnnnnnnnnnnnnnnnnnnnnnnnnnnnnnnnnnnnnnnnnnnnnnnnnnnnnnnnnnnnnnnnnnnnnnnnnnnnnnnnnnnnnnnnnnnnnnnnnnnnnnnnnnnnnnnnnnnnnnnnnnnnnnnnnnnnnnnnnnnnnnnnnnnnnnnnnnnnnnnnnnnnnnnnnnnnnnnnnnnnnnnnnnnnnnnnnnnnnnnnnnnnnnnnnnnnnnnnnnnnnnnnnnnnnnnnnnnnnnnnnnnnnnnnnnnnnnnnnnnnnnnnnnnnnnnnnnnnnnnnnnnnnnnnnnnnnnnnnnnnnnnnnnnnnnnnnnnnnnnnnnnnnnnnnnnnnnnnnnnnnnnnnnnnnnnnnnnnnnnnnnnnnnnnnnnnnnnnnnnnnnnnnnnnnnnnnnnnnnnnnnnnnnnnnnnnnnnnnnnnnnnnnnnnnnnnnnnnnnnnnnnnnnnnnnnnnnnnnnnnnnnnnnnnnnnnnnnnnnnnnnnnnnnnnnnnnnnnnnnnnnnnnnnnnnnnnnnnnnnnnnnnnnnnnnnnnnnnnnnnnnnnnnnnnnnnnnnnnnnnnnnnnnnnnnnnnnnnnnnnnnnnnnnnnnnnnnnnnnnnnnnnnnnnnnnnnnnnnnnnnnnnnnnnnnnnnnnnnnnnnnnnnnnnnnnnnnnnnnnnnnnnnnnnnnnnnnnnnnnnnnnnnnnnnnnnnnnnnnnnnnnnnnnnnnnnnnnnnnnnnnnnnnnnnnnnnnnnnnnnnnnnnnnnnnnnnnnnnnnnnnnnnnnnnnnnnnnnnnnnnnnnnnnnnnnnnnnnnnnnnnnnnnnnnnnnnnnnnnnnnnnnnnnnnnnnnnnnnnnnnnnnnnnnnnnnnnnnnnnnnnnnnnnnnnnnnnnnnnnnnnnnnnnnnnnnnnnnnnnnnnnnnnnnnnnnnnnnnnnnnnnnnnnnnnnnnnnnnnnnnnnnnnnnnnnnnnnnnnnnnnnnnnnnnnnnnnnnnnnnnnnnnnnnnnnnnnnnnnnnnnnnnnnnnnnnnnnnnnnnnnnnnnnnnnnnnnnnnnnnnnnnnnnnnnnnnnnnnnnnnnnnnnnnnnnnnnnnnnnnnnnnnnnnnnnnnnnnnnnnnnnnnnnnnnnnnnnnnnnnnnnnnnnnnnnnnnnnnnnnnnnnnnnnnnnnnnnnnnnnnnnnnnnnnnnnnnnnnnnnnnnnnnnnnnnnnnnnnnnnnnnnnnnnnnnnnnnnnnnnnnnnnnnnnnnnnnnnnnnnnnnnnnnnnnnnnnnnnnnnnnnnnnnnnnnnnnnnnnnnnnnnnnnnnnnnnnnnnnnnnnnnnnnnnnnnnnnnnnnnnnnnnnnnnnnnnnnnnnnnnnnnnnnnnnnnnnnnnnnnnnnnnnnnnnnnnnnnnnnnnnnnnnnnnnnnnnnnnnnnnnnnnnnnnnnnnnnnnnnnnnnnnnnnnnnnnnnnnnnnnnnnnnnnnnnnnnnnnnnnnnnnnnnnnnnnnnnnnnnnnnnnnnnnnnnnnnnnnnnnnnnnnnnnnnnnnnnnnnnnnnnnnnnnnnnnnnnnnnnnnnnnnnnnnnnnnnnnnnnnnnnnnnnnnnnnnnnnnnnnnnnnnnnnnnnnnnnnnnnnnnnnnnnnnnnnnnnnnnnnnnnnnnnnnnnnnnnnnnnnnnnnnnnnnnnnnnnnnnnnnnnnnnnnnnnnnnnnnnnnnnnnnnnnnnnnnnnnnnnnnnnnnnnnnnnnnnnnnnnnnnnnnnnnnnnnnnnnnnnnnnnnnnnnnnnnnnnnnnnnnnnnnnnnnnnnnnnnnnnnnnnnnnnnnnnnnnnnnnnnnnnnnnnnnnnnnnnnnnnnnnnnnnnnnnnnnnnnnnnnnnnnnnnnnnnnnnnnnnnnnnnnnnnnnnnnnnnnnnnnnnnnnnnnnnnnnnnnnnnnnnnnnnnnnnnnnnnnnnnnnnnnnnnnnnnnnnnnnnnnnnnnnnnnnnnnnnnnnnnnnnnnnnnnnnnnnnnnnnnnnnnnnnnnnnnnnnnnnnnnnnnnnnnnnnnnnnnnnnnnnnnnnnnnnnnnnnnnnnnnnnnnnnnnnnnnnnnnnnnnnnnnnnnnnnnnnnnnnnnnnnnnnnnnnnnnnnnnnnnnnnnnnnnnnnnnnnnnnnnnnnnnnnnnnnnnnnnnnnnnnnnnnnnnnnnnnnnnnnnnnnnnnnnnnnnnnnnnnnnnnnnnnnnnnnnnnnnnnnnnnnnnnnnnnnnnnnnnnnnnnnnnnnnnnnnnnnnnnnnnnnnnnnnnnnnnnnnnnnnnnnnnnnnnnnnnnnnnnnnnnnnnnnnnnnnnnnnnnnnnnnnnnnnnnnnnnnnnnnnnnnnnnnnnnnnnnnnnnnnnnnnnnnnnnnnnnnnnnnnnnnnnnnnnnnnnnnnnnnnnnnnnnnnnnnnnnnnnnnnnnnnnnnnnnnnnnnnnnnnnnnnnnnnnnnnnnnnnnnnnnnnnnnnnnnnnnnnnnnnnnnnnnnnnnnnnnnnnnnnnnnnnnnnnnnnnnnnnnnnnnnnnnnnnnnnnnnnnnnnnnnnnnnnnnnnnnnnnnnnnnnnnnnnnnnnnnnnnnnnnnnnnnnnnnnnnnnnnnnnnnnnnnnnnnnnnnnnnnnnnnnnnnnnnnnnnnnnnnnnnnnnnnnnnnnnnnnnnnnnnnnnnnnnnnnnnnnnnnnnnnnnnnnnnnnnnnnnnnnnnnnnnnnnnnnnnnnnnnnnnnnnnnnnnnnnnnnnnnnnnnnnnnnnnnnnnnnnnnnnnnnnnnnnnnnnnnnnnnnnnnnnnnnnnnnnnnnnnnnnnnnnnnnnnnnnnnnnnnnnnnnnnnnnnnnnnnnnnnnnnnnnnnnnnnnnnnnnnnnnnnnnnnnnnnnnnnnnnnnnnnnnnnnnnnnnnnnnnnnnnnnnnnnnnnnnnnnnnnnnnnnnnnnnnnnnnnnnnnnnnnnnnnnnnnnnnnnnnnnnnnnnnnnnnnnnnnnnnnnnnnnnnnnnnnnnnnnnnnnnnnnnnnnnnnnnnnnnnnnnnnnnnnnnnnnnnnnnnnnnnnnnnnnnnnnnnnnnnnnnnnnnnnnnnnnnnnnnnnnnnnnnnnnnnnnnnnnnnnnnnnnnnnnnnnnnnnnnnnnnnnnnnnnnnnnnnnnnnnnnnnnnnnnnnnnnnnnnnnnnnnnnnnnnnnnnnnnnnnnnnnnnnnnnnnnnnnnnnnnnnnnnnnnnnnnnnnnnnnnnnnnnnnnnnnnnnnnnnnnnnnnnnnnnnnnnnnnnnnnnnnnnnnnnnnnnnnnnnnnnnnnnnnnnnnnnnnnnnnnnnnnnnnnnnnnnnnnnnnnnnnnnnnnnnnnnnnnnnnnnnnnnnnnnnnnnnnnnnnnnnnnnnnnnnnnnnnnnnnnnnnnnnnnnnnnnnnnnnnnnnnnnnnnnnnnnnnnnnnnnnnnnnnnnnnnnnnnnnnnnnnnnnnnnnnnnnnnnnnnnnnnnnnnnnnnnnnnnnnnnnnnnnnnnnnnnnnnnnnnnnnnnnnnnnnnnnnnnnnnnnnnnnnnnnnnnnnnnnnnnnnnnnnnnnnnnnnnnnnnnnnnnnnnnnnnnnnnnnnnnnnnnnnnnnnnnnnnnnnnnnnnnnnnnnnnnnnnnnnnnnnnnnnnnnnnnnnnnnnnnnnnnnnnnnnnnnnnnnnnnnnnnnnnnnnnnnnnnnnnnnnnnnnnnnnnnnnnnnnnnnnnnnnnnnnnnnnnnnnnnnnnnnnnnnnnnnnnnnnnnnnnnnnnnnnnnnnnnnnnnnnnnnnnnnnnnnnnnnnnnnnnnnnnnnnnnnnnnnnnnnnnnnnnnnnnnnnnnnnnnnnnnnnnnnnnnnnnnnnnnnnnnnnnnnnnnnnnnnnnnnnnnnnnnnnnnnnnnnnnnnnnnnnnnnnnnnnnnnnnnnnnnnnnnnnnnnnnnnnnnnnnnnnnnnnnnnnnnnnnnnnnnnnnnnnnnnnnnnnnnnnnnnnnnnnnnnnnnnnnnnnnnnnnnnnnnnnnnnnnnnnnnnnnnnnnnnnnnnnnnnnnnnnnnnnnnnnnnnnnnnnnnnnnnnnnnnnnnnnnnnnnnnnnnnnnnnnnnnnnnnnnnnnnnnnnnnnnnnnnnnnnnnnnnnnnnnnnnnnnnnnnnnnnnnnnnnnnnnnnnnnnnnnnnnnnnnnnnnnnnnnnnnnnnnnnnnnnnnnnnnnnnnnnnnnnnnnnnnnnnnnnnnnnnnnnnnnnnnnnnnnnnnnnnnnnnnnnnnnnnnnnnnnnnnnnnnnnnnnnnnnnnnnnnnnnnnnnnnnnnnnnnnnnnnnnnnnnnnnnnnnnnnnnnnnnnnnnnnnnnnnnnnnnnnnnnnnnnnnnnnnnnnnnnnnnnnnnnnnnnnnnnnnnnnnnnnnnnnnnnnnnnnnnnnnnnnnnnnnnnnnnnnnnnnnnnnnnnnnnnnnnnnnnnnnnnnnnnnnnnnnnnnnnnnnnnnnnnnnnnnnnnnnnnnnnnnnnnnnnnnnnnnnnnnnnnnnnnnnnnnnnnnnnnnnnnnnnnnnnnnnnnnnnnnnnnnnnnnnnnnnnnnnnnnnnnnnnnnnnnnnnnnnnnnnnnnnnnnnnnnnnnnnnnnnnnnnnnnnnnnnnnnnnnnnnnnnnnnnnnnnnnnnnnnnnnnnnnnnnnnnnnnnnnnnnnnnnnnnnnnnnnnnnnnnnnnnnnnnnnnnnnnnnnnnnnnnnnnnnnnnnnnnnnnnnnnnnnnnnnnnnnnnnnnnnnnnnnnnnnnnnnnnnnnnnnnnnnnnnnnnnnnnnnnnnnnnnnnnnnnnnnnnnnnnnnnnnnnnnnnnnnnnnnnnnnnnnnnnnnnnnnnnnnnnnnnnnnnnnnnnnnnnnnnnnnnnnnnnnnnnnnnnnnnnnnnnnnnnnnnnnnnnnnnnnnnnnnnnnnnnnnnnnnnnnnnnnnnnnnnnnnnnnnnnnnnnnnnnnnnnnnnnnnnnnnnnnnnnnnnnnnnnnnnnnnnnnnnnnnnnnnnnnnnnnnnnnnnnnnnnnnnnnnnnnnnnnnnnnnnnnnnnnnnnnnnnnnnnnnnnnnnnnnnnnnnnnnnnnnnnnnnnnnnnnnnnnnnnnnnnnnnnnnnnnnnnnnnnnnnnnnnnnnnnnnnnnnnnnnnnnnnnnnnnnnnnnnnnnnnnnnnnnnnnnnnnnnnnnnnnnnnnnnnnnnnnnnnnnnnnnnnnnnnnnnnnnnnnnnnnnnnnnnnnnnnnnnnnnnnnnnnnnnnnnnnnnnnnnnnnnnnnnnnnnnnnnnnnnnnnnnnnnnnnnnnnnnnnnnnnnnnnnnnnnnnnnnnnnnnnnnnnnnnnnnnnnnnnnnnnnnnnnnnnnnnnnnnnnnnnnnnnnnnnnnnnnnnnnnnnnnnnnnnnnnnnnnnnnnnnnnnnnnnnnnnnnnnnnnnnnnnnnnnnnnnnnnnnnnnnnnnnnnnnnnnnnnnnnnnnnnnnnnnnnnnnnnnnnnnnnnnnnnnnnnnnnnnnnnnnnnnnnnnnnnnnnnnnnnnnnnnnnnnnnnnnnnnnnnnnnnnnnnnnnnnnnnnnnnnnnnnnnnnnnnnnnnnnnnnnnnnnnnnnnnnnnnnnnnnnnnnnnnnnnnnnnnnnnnnnnnnnnnnnnnnnnnnnnnnnnnnnnnnnnnnnnnnnnnnnnnnnnnnnnnnnnnnnnnnnnnnnnnnnnnnnnnnnnnnnnnnnnnnnnnnnnnnnnnnnnnnnnnnnnnnnnnnnnnnnnnnnnnnnnnnnnnnnnnnnnnnnnnnnnnnnnnnnnnnnnnnnnnnnnnnnnnnnnnnnnnnnnnnnnnnnnnnnnnnnnnnnnnnnnnnnnnnnnnnnnnnnnnnnnnnnnnnnnnnnnnnnnnnnnnnnnnnnnnnnnnnnnnnnnnnnnnnnnnnnnnnnnnnnnnnnnnnnnnnnnnnnnnnnnnnnnnnnnnnnnnnnnnnnnnnnnnnnnnnnnnnnnnnnnnnnnnnnnnnnnnnnnnnnnnnnnnnnnnnnnnnnnnnnnnnnnnnnnnnnnnnnnnnnnnnnnnnnnnnnnnnnnnnnnnnnnnnnnnnnnnnnnnnnnnnnnnnnnnnnnnnnnnnnnnnnnnnnnnnnnnnnnnnnnnnnnnnnnnnnnnnnnnnnnnnnnnnnnnnnnnnnnnnnnnnnnnnnnnnnnnnnnnnnnnnnnnnnnnnnnnnnnnnnnnnnnnnnnnnnnnnnnnnnnnnnnnnnnnnnnnnnnnnnnnnnnnnnnnnnnnnnnnnnnnnnnnnnnnnnnnnnnnnnnnnnnnnnnnnnnnnnnnnnnnnnnnnnnnnnnnnnnnnnnnnnnnnnnnnnnnnnnnnnnnnnnnnnnnnnnnnnnnnnnnnnnnnnnnnnnnnnnnnnnnnnnnnnnnnnnnnnnnnnnnnnnnnnnnnnnnnnnnnnnnnnnnnnnnnnnnnnnnnnnnnnnnnnnnnnnnnnnnnnnnnnnnnnnnnnnnnnnnnnnnnnnnnnnnnnnnnnnnnnnnnnnnnnnnnnnnnnnnnnnnnnnnnnnnnnnnnnnnnnnnnnnnnnnnnnnnnnnnnnnnnnnnnnnnnnnnnnnnnnnnnnnnnnnnnnnnnnnnnnnnnnnnnnnnnnnnnnnnnnnnnnnnnnnnnnnnnnnnnnnnnnnnnnnnnnnnnnnnnnnnnnnnnnnnnnnnnnnnnnnnnnnnnnnnnnnnnnnnnnnnnnnnnnnnnnnnnnnnnnnnnnnnnnnnnnnnnnnnnnnnnnnnnnnnnnnnnnnnnnnnnnnnnnnnnnnnnnnnnnnnnnnnnnnnnnnnnnnnnnnnnnnnnnnnnnnnnnnnnnnnnnnnnnnnnnnnnnnnnnnnnnnnnnnnnnnnnnnnnnnnnnnnnnnnnnnnnnnnnnnnnnnnnnnnnnnnnnnnnnnnnnnnnnnnnnnnnnnnnnnnnnnnnnnnnnnnnnnnnnnnnnnnnnnnnnnnnnnnnnnnnnnnnnnnnnnnnnnnnnnnnnnnnnnnnnnnnnnnnnnnnnnnnnnnnnnnnnnnnnnnnnnnnnnnnnnnnnnnnnnnnnnnnnnnnnnnnnnnnnnnnnnnnnnnnnnnnnnnnnnnnnnnnnnnnnnnnnnnnnnnnnnnnnnnnnnnnnnnnnnnnnnnnnnnnnnnnnnnnnnnnnnnnnnnnnnnnnnnnnnnnnnnnnnnnnnnnnnnnnnnnnnnnnnnnnnnnnnnnnnnnnnnnnnnnnnnnnnnnnnnnnnnnnnnnnnnnnnnnnnnnnnnnnnnnnnnnnnnnnnnnnnnnnnnnnnnnnnnnnnnnnnnnnnnnnnnnnnnnnnnnnnnnnnnnnnnnnnnnnnnnnnnnnnnnnnnnnnnnnnnnnnnnnnnnnnnnnnnnnnnnnnnnnnnnnnnnnnnnnnnnnnnnnnnnnnnnnnnnnnnnnnnnnnnnnnnnnnnnnnnnnnnnnnnnnnnnnnnnnnnnnnnnnnnnnnnnnnnnnnnnnnnnnnnnnnnnnnnnnnnnnnnnnnnnnnnnnnnnnnnnnnnnnnnnnnnnnnnnnnnnnnnnnnnnnnnnnnnnnnnnnnnnnnnnnnnnnnnnnnnnnnnnnnnnnnnnnnnnnnnnnnnnnnnnnnnnnnnnnnnnnnnnnnnnnnnnnnnnnnnnnnnnnnnnnnnnnnnnnnnnnnnnnnnnnnnnnnnnnnnnnnnnnnnnnnnnnnnnnnnnnnnnnnnnnnnnnnnnnnnnnnnnnnnnnnnnnnnnnnnnnnnnnnnnnnnnnnnnnnnnnnnnnnnnnnnnnnnnnnnnnnnnnnnnnnnnnnnnnnnnnnnnnnnnnnnnnnnnnnnnnnnnnnnnnnnnnnnnnnnnnnnnnnnnnnnnnnnnnnnnnnnnnnnnnnnnnnnnnnnnnnnnnnnnnnnnnnnnnnnnnnnnnnnnnnnnnnnnnnnnnnnnnnnnnnnnnnnnnnnnnnnnnnnnnnnnnnnnnnnnnnnnnnnnnnnnnnnnnnnnnnnnnnnnnnnnnnnnnnnnnnnnnnnnnnnnnnnnnnnnnnnnnnnnnnnnnnnnnnnnnnnnnnnnnnnnnnnnnnnnnnnnnnnnnnnnnnnnnnnnnnnnnnnnnnnnnnnnnnnnnnnnnnnnnnnnnnnnnnnnnnnnnnnnnnnnnnnnnnnnnnnnnnnnnnnnnnnnnnnnnnnnnnnnnnnnnnnnnnnnnnnnnnnnnnnnnnnnnnnnnnnnnnnnnnnnnnnnnnnnnnnnnnnnnnnnnnnnnnnnnnnnnnnnnnnnnnnnnnnnnnnnnnnnnnnnnnnnnnnnnnnnnnnnnnnnnnnnnnnnnnnnnnnnnnnnnnnnnnnnnnnnnnnnnnnnnnnnnnnnnnnnnnnnnnnnnnnnnnnnnnnnnnnnnnnnnnnnnnnnnnnnnnnnnnnnnnnnnnnnnnnnnnnnnnnnnnnnnnnnnnnnnnnnnnnnnnnnnnnnnnnnnnnnnnnnnnnnnnnnnnnnnnnnnnnnnnnnnnnnnnnnnnnnnnnnnnnnnnnnnnnnnnnnnnnnnnnnnnnnnnnnnnnnnnnnnnnnnnnnnnnnnnnnnnnnnnnnnnnnnnnnnnnnnnnnnnnnnnnnnnnnnnnnnnnnnnnnnnnnnnnnnnnnnnnnnnnnnnnnnnnnnnnnnnnnnnnnnnnnnnnnnnnnnnnnnnnnnnnnnnnnnnnnnnnnnnnnnnnnnnnnnnnnnnnnnnnnnnnnnnnnnnnnnnnnnnnnnnnnnnnnnnnnnnnnnnnnnnnnnnnnnnnnnnnnnnnnnnnnnnnnnnnnnnnnnnnnnnnnnnnnnnnnnnnnnnnnnnnnnnnnnnnnnnnnnnnnnnnnnnnnnnnnnnnnnnnnnnnnnnnnnnnnnnnnnnnnnnnnnnnnnnnnnnnnnnnnnnnnnnnnnnnnnnnnnnnnnnnnnnnnnnnnnnnnnnnnnnnnnnnnnnnnnnnnnnnnnnnnnnnnnnnnnnnnnnnnnnnnnnnnnnnnnnnnnnnnnnnnnnnnnnnnnnnnnnnnnnnnnnnnnnnnnnnnnnnnnnnnnnnnnnnnnnnnnnnnnnnnnnnnnnnnnnnnnnnnnnnnnnnnnnnnnnnnnnnnnnnnnnnnnnnnnnnnnnnnnnnnnnnnnnnnnnnnnnnnnnnnnnnnnnnnnnnnnnnnnnnnnnnnnnnnnnnnnnnnnnnnnnnnnnnnnnnnnnnnnnnnnnnnnnnnnnnnnnnnnnnnnnnnnnnnnnnnnnnnnnnnnnnnnnnnnnnnnnnnnnnnnnnnnnnnnnnnnnnnnnnnnnnnnnnnnnnnnnnnnnnnnnnnnnnnnnnnnnnnnnnnnnnnnnnnnnnnnnnnnnnnnnnnnnnnnnnnnnnnnnnnnnnnnnnnnnnnnnnnnnnnnnnnnnnnnnnnnnnnnnnnnnnnnnnnnnnnnnnnnnnnnnnnnnnnnnnnnnnnnnnnnnnnnnnnnnnnnnnnnnnnnnnnnnnnnnnnnnnnnnnnnnnnnnnnnnnnnnnnnnnnnnnnnnnnnnnnnnnnnnnnnnnnnnnnnnnnnnnnnnnnnnnnnnnnnnnnnnnnnnnnnnnnnnnnnnnnnnnnnnnnnnnnnnnnnnnnnnnnnnnnnnnnnnnnnnnnnnnnnnnnnnnnnnnnnnnnnnnnnnnnnnnnnnnnnnnnnnnnnnnnnnnnnnnnnnnnnnnnnnnnnnnnnnnnnnnnnnnnnnnnnnnnnnnnnnnnnnnnnnnnnnnnnnnnnnnnnnnnnnnnnnnnnnnnnnnnnnnnnnnnnnnnnnnnnnnnnnnnnnnnnnnnnnnnnnnnnnnnnnnnnnnnnnnnnnnnnnnnnnnnnnnnnnnnnnnnnnnnnnnnnnnnnnnnnnnnnnnnnnnnnnnnnnnnnnnnnnnnnnnnnnnnnnnnnnnnnnnnnnnnnnnnnnnnnnnnnnnnnnnnnnnnnnnnnnnnnnnnnnnnnnnnnnnnnnnnnnnnnnnnnnnnnnnnnnnnnnnnnnnnnnnnnnnnnnnnnnnnnnnnnnnnnnnnnnnnnnnnnnnnnnnnnnnnnnnnnnnnnnnnnnnnnnnnnnnnnnnnnnnnnnnnnnnnnnnnnnnnnnnnnnnnnnnnnnnnnnnnnnnnnnnnnnnnnnnnnnnnnnnnnnnnnnnnnnnnnnnnnnnnnnnnnnnnnnnnnnnnnnnnnnnnnnnnnnnnnnnnnnnnnnnnnnnnnnnnnnnnnnnnnnnnnnnnnnnnnnnnnnnnnnnnnnnnnnnnnnnnnnnnnnnnnnnnnnnnnnnnnnnnnnnnnnnnnnnnnnnnnnnnnnnnnnnnnnnnnnnnnnnnnnnnnnnnnnnnnnnnnnnnnnnnnnnnnnnnnnnnnnnnnnnnnnnnnnnnnnnnnnnnnnnnnnnnnnnnnnnnnnnnnnnnnnnnnnnnnnnnnnnnnnnnnnnnnnnnnnnnnnnnnnnnnnnnnnnnnnnnnnnnnnnnnnnnnnnnnnnnnnnnnnnnnnnnnnnnnnnnnnnnnnnnnnnnnnnnnnnnnnnnnnnnnnnnnnnnnnnnnnnnnnnnnnnnnnnnnnnnnnnnnnnnnnnnnnnnnnnnnnnnnnnnnnnnnnnnnnnnnnnnnnnnnnnnnnnnnnnnnnnnnnnnnnnnnnnnnnnnnnnnnnnnnnnnnnnnnnnnnnnnnnnnnnnnnnnnnnnnnnnnnnnnnnnnnnnnnnnnnnnnnnnnnnnnnnnnnnnnnnnnnnnnnnnnnnnnnnnnnnnnnnnnnnnnnnnnnnnnnnnnnnnnnnnnnnnnnnnnnnnnnnnnnnnnnnnnnnnnnnnnnnnnnnnnnnnnnnnnnnnnnnnnnnnnnnnnnnnnnnnnnnnnnnnnnnnnnnnnnnnnnnnnnnnnnnnnnnnnnnnnnnnnnnnnnnnnnnnnnnnnnnnnnnnnnnnnnnnnnnnnnnnnnnnnnnnnnnnnnnnnnnnnnnnnnnnnnnnnnnnnnnnnnnnnnnnnnnnnnnnnnnnnnnnnnnnnnnnnnnnnnnnnnnnnnnnnnnnnnnnnnnnnnnnnnnnnnnnnnnnnnnnnnnnnnnnnnnnnnnnnnnnnnnnnnnnnnnnnnnnnnnnnnnnnnnnnnnnnnnnnnnnnnnnnnnnnnnnnnnnnnnnnnnnnnnnnnnnnnnnnnnnnnnnnnnnnnnnnnnnnnnnnnnnnnnnnnnnnnnnnnnnnnnnnnnnnnnnnnnnnnnnnnnnnnnnnnnnnnnnnnnnnnnnnnnnnnnnnnnnnnnnnnnnnnnnnnnnnnnnnnnnnnnnnnnnnnnnnnnnnnnnnnnnnnnnnnnnnnnnnnnnnnnnnnnnnnnnnnnnnnnnnnnnnnnnnnnnnnnnnnnnnnnnnnnnnnnnnnnnnnnnnnnnnnnnnnnnnnnnnnnnnnnnnnnnnnnnnnnnnnnnnnnnnnnnnnnnnnnnnnnnnnnnnnnnnnnnnnnnnnnnnnnnnnnnnnnnnnnnnnnnnnnnnnnnnnnnnnnnnnnnnnnnnnnnnnnnnnnnnnnnnnnnnnnnnnnnnnnnnnnnnnnnnnnnnnnnnnnnnnnnnnnnnnnnnnnnnnnnnnnnnnnnnnnnnnnnnnnnnnnnnnnnnnnnnnnnnnnnnnnnnnnnnnnnnnnnnnnnnnnnnnnnnnnnnnnnnnnnnnnnnnnnnnnnnnnnnnnnnnnnnnnnnnnnnnnnnnnnnnnnnnnnnnnnnnnnnnnnnnnnnnnnnnnnnnnnnnnnnnnnnnnnnnnnnnnnnnnnnnnnnnnnnnnnnnnnnnnnnnnnnnnnnnnnnnnnnnnnnnnnnnnnnnnnnnnnnnnnnnnnnnnnnnnnnnnnnnnnnnnnnnnnnnnnnnnnnnnnnnnnnnnnnnnnnnnnnnnnnnnnnnnnnnnnnnnnnnnnnnnnnnnnnnnnnnnnnnnnnnnnnnnnnnnnnnnnnnnnnnnnnnnnnnnnnnnnnnnnnnnnnnnnnnnnnnnnnnnnnnnnnnnnnnnnnnnnnnnnnnnnnnnnnnnnnnnnnnnnnnnnnnnnnnnnnnnnnnnnnnnnnnnnnnnnnnnnnnnnnnnnnnnnnnnnnnnnnnnnnnnnnnnnnnnnnnnnnnnnnnnnnnnnnnnnnnnnnnnnnnnnnnnnnnnnnnnnnnnnnnnnnnnnnnnnnnnnnnnnnnnnnnnnnnnnnnnnnnnnnnnnnnnnnnnnnnnnnnnnnnnnnnnnnnnnnnnnnnnnnnnnnnnnnnnnnnnnnnnnnnnnnnnnnnnnnnnnnnnnnnnnnnnnnnnnnnnnnnnnnnnnnnnnnnnnnnnnnnnnnnnnnnnnnnnnnnnnnnnnnnnnnnnnnnnnnnnnnnnnnnnnnnnnnnnnnnnnnnnnnnnnnnnnnnnnnnnnnnnnnnnnnnnnnnnnnnnnnnnnnnnnnnnnnnnnnnnnnnnnnnnnnnnnnnnnnnnnnnnnnnnnnnnnnnnnnnnnnnnnnnnnnnnnnnnnnnnnnnnnnnnnnnnnnnnnnnnnnnnnnnnnnnnnnnnnnnnnnnnnnnnnnnnnnnnnnnnnnnnnnnnnnnnnnnnnnnnnnnnnnnnnnnnnnnnnnnnnnnnnnnnnnnnnnnnnnnnnnnnnnnnnnnnnnnnnnnnnnnnnnnnnnnnnnnnnnnnnnnnnnnnnnnnnnnnnnnnnnnnnnnnnnnnnnnnnnnnnnnnnnnnnnnnnnnnnnnnnnnnnnnnnnnnnnnnnnnnnnnnnnnnnnnnnnnnnnnnnnnnnnnnnnnnnnnnnnnnnnnnnnnnnnnnnnnnnnnnnnnnnnnnnnnnnnnnnnnnnnnnnnnnnnnnnnnnnnnnnnnnnnnnnnnnnnnnnnnnnnnnnnnnnnnnnnnnnnnnnnnnnnnnnnnnnnnnnnnnnnnnnnnnnnnnnnnnnnnnnnnnnnnnnnnnnnnnnnnnnnnnnnnnnnnnnnnnnnnnnnnnnnnnnnnnnnnnnnnnnnnnnnnnnnnnnnnnnnnnnnnnnnnnnnnnnnnnnnnnnnnnnnnnnnnnnnnnnnnnnnnnnnnnnnnnnnnnnnnnnnnnnnnnnnnnnnnnnnnnnnnnnnnnnnnnnnnnnnnnnnnnnnnnnnnnnnnnnnnnnnnnnnnnnnnnnnnnnnnnnnnnnnnnnnnnnnnnnnnnnnnnnnnnnnnnnnnnnnnnnnnnnnnnnnnnnnnnnnnnnnnnnnnnnnnnnnnnnnnnnnnnnnnnnnnnnnnnnnnnnnnnnnnnnnnnnnnnnnnnnnnnnnnnnnnnnnnnnnnnnnnnnnnnnnnnnnnnnnnnnnnnnnnnnnnnnnnnnnnnnnnnnnnnnnnnnnnnnnnnnnnnnnnnnnnnnnnnnnnnnnnnnnnnnnnnnnnnnnnnnnnnnnnnnnnnnnnnnnnnnnnnnnnnnnnnnnnnnnnnnnnnnnnnnnnnnnnnnnnnnnnnnnnnnnnnnnnnnnnnnnnnnnnnnnnnnnnnnnnnnnnnnnnnnnnnnnnnnnnnnnnnnnnnnnnnnnnnnnnnnnnnnnnnnnnnnnnnnnnnnnnnnnnnnnnnnnnnnnnnnnnnnnnnnnnnnnnnnnnnnnnnnnnnnnnnnnnnnnnnnnnnnnnnnnnnnnnnnnnnnnnnnnnnnnnnnnnnnnnnnnnnnnnnnnnnnnnnnnnnnnnnnnnnnnnnnnnnnnnnnnnnnnnnnnnnnnnnnnnnnnnnnnnnnnnnnnnnnnnnnnnnnnnnnnnnnnnnnnnnnnnnnnnnnnnnnnnnnnnnnnnnnnnnnnnnnnnnnnnnnnnnnnnnnnnnnnnnnnnnnnnnnnnnnnnnnnnnnnnnnnnnnnnnnnnnnnnnnnnnnnnnnnnnnnnnnnnnnnnnnnnnnnnnnnnnnnnnnnnnnnnnnnnnnnnnnnnnnnnnnnnnnnnnnnnnnnnnnnnnnnnnnnnnnnnnnnnnnnnnnnnnnnnnnnnnnnnnnnnnnnnnnnnnnnnnnnnnnnnnnnnnnnnnnnnnnnnnnnnnnnnnnnnnnnnnnnnnnnnnnnnnnnnnnnnnnnnnnnnnnnnnnnnnnnnnnnnnnnnnnnnnnnnnnnnnnnnnnnnnnnnnnnnnnnnnnnnnnnnnnnnnnnnnnnnnnnnnnnnnnnnnnnnnnnnnnnnnnnnnnnnnnnnnnnnnnnnnnnnnnnnnnnnnnnnnnnnnnnnnnnnnnnnnnnnnnnnnnnnnnnnnnnnnnnnnnnnnnnnnnnnnnnnnnnnnnnnnnnnnnnnnnnnnnnnnnnnnnnnnnnnnnnnnnnnnnnnnnnnnnnnnnnnnnnnnnnnnnnnnnnnnnnnnnnnnnnnnnnnnnnnnnnnnnnnnnnnnnnnnnnnnnnnnnnnnnnnnnnnnnnnnnnnnnnnnnnnnnnnnnnnnnnnnnnnnnnnnnnnnnnnnnnnnnnnnnnnnnnnnnnnnnnnnnnnnnnnnnnnnnnnnnnnnnnnnnnnnnnnnnnnnnnnnnnnnnnnnnnnnnnnnnnnnnnnnnnnnnnnnnnnnnnnnnnnnnnnnnnnnnnnnnnnnnnnnnnnnnnnnnnnnnnnnnnnnnnnnnnnnnnnnnnnnnnnnnnnnnnnnnnnnnnnnnnnnnnnnnnnnnnnnnnnnnnnnnnnnnnnnnnnnnnnnnnnnnnnnnnnnnnnnnnnnnnnnnnnnnnnnnnnnnnnnnnnnnnnnnnnnnnnnnnnnnnnnnnnnnnnnnnnnnnnnnnnnnnnnnnnnnnnnnnnnnnnnnnnnnnnnnnnnnnnnnnnnnnnnnnnnnnnnnnnnnnnnnnnnnnnnnnnnnnnnnnnnnnnnnnnnnnnnnnnnnnnnnnnnnnnnnnnnnnnnnnnnnnnnnnnnnnnnnnnnnnnnnnnnnnnnnnnnnnnnnnnnnnnnnnnnnnnnnnnnnnnnnnnnnnnnnnnnnnnnnnnnnnnnnnnnnnnnnnnnnnnnnnnnnnnnnnnnnnnnnnnnnnnnnnnnnnnnnnnnnnnnnnnnnnnnnnnnnnnnnnnnnnnnnnnnnnnnnnnnnnnnnnnnnnnnnnnnnnnnnnnnnnnnnnnnnnnnnnnnnnnnnnnnnnnnnnnnnnnnnnnnnnnnnnnnnnnnnnnnnnnnnnnnnnnnnnnnnnnnnnnnnnnnnnnnnnnnnnnnnnnnnnnnnnnnnnnnnnnnnnnnnnnnnnnnnnnnnnnnnnnnnnnnnnnnnnnnnnnnnnnnnnnnnnnnnnnnnnnnnnnnnnnnnnnnnnnnnnnnnnnnnnnnnnnnnnnnnnnnnnnnnnnnnnnnnnnnnnnnnnnnnnnnnnnnnnnnnnnnnnnnnnnnnnnnnnnnnnnnnnnnnnnnnnnnnnnnnnnnnnnnnnnnnnnnnnnnnnnnnnnnnnnnnnnnnnnnnnnnnnnnnnnnnnnnnnnnnnnnnnnnnnnnnnnnnnnnnnnnnnnnnnnnnnnnnnnnnnnnnnnnnnnnnnnnnnnnnnnnnnnnnnnnnnnnnnnnnnnnnnnnnnnnnnnnnnnnnnnnnnnnnnnnnnnnnnnnnnnnnnnnnnnnnnnnnnnnnnnnnnnnnnnnnnnnnnnnnnnnnnnnnnnnnnnnnnnnnnnnnnnnnnnnnnnnnnnnnnnnnnnnnnnnnnnnnnnnnnnnnnnnnnnnnnnnnnnnnnnnnnnnnnnnnnnnnnnnnnnnnnnnnnnnnnnnnnnnnnnnnnnnnnnnnnnnnnnnnnnnnnnnnnnnnnnnnnnnnnnnnnnnnnnnnnnnnnnnnnnnnnnnnnnnnnnnnnnnnnnnnnnnnnnnnnnnnnnnnnnnnnnnnnnnnnnnnnnnnnnnnnnnnnnnnnnnnnnnnnnnnnnnnnnnnnnnnnnnnnnnnnnnnnnnnnnnnnnnnnnnnnnnnnnnnnnnnnnnnnnnnnnnnnnnnnnnnnnnnnnnnnnnnnnnnnnnnnnnnnnnnnnnnnnnnnnnnnnnnnnnnnnnnnnnnnnnnnnnnnnnnnnnnnnnnnnnnnnnnnnnnnnnnnnnnnnnnnnnnnnnnnnnnnnnnnnnnnnnnnnnnnnnnnnnnnnnnnnnnnnnnnnnnnnnnnnnnnnnnnnnnnnnnnnnnnnnnnnnnnnnnnnnnnnnnnnnnnnnnnnnnnnnnnnnnnnnnnnnnnnnnnnnnnnnnnnnnnnnnnnnnnnnnnnnnnnnnnnnnnnnnnnnnnnnnnnnnnnnnnnnnnnnnnnnnnnnnnnnnnnnnnnnnnnnnnnnnnnnnnnnnnnnnnnnnnnnnnnnnnnnnnnnnnnnnnnnnnnnnnnnnnnnnnnnnnnnnnnnnnnnnnnnnnnnnnnnnnnnnnnnnnnnnnnnnnnnnnnnnnnnnnnnnnnnnnnnnnnnnnnnnnnnnnnnnnnnnnnnnnnnnnnnnnnnnnnnnnnnnnnnnnnnnnnnnnnnnnnnnnnnnnnnnnnnnnnnnnnnnnnnnnnnnnnnnnnnnnnnnnnnnnnnnnnnnnnnnnnnnnnnnnnnnnnnnnnnnnnnnnnnnnnnnnnnnnnnnnnnnnnnnnnnnnnnnnnnnnnnnnnnnnnnnnnnnnnnnnnnnnnnnnnnnnnnnnnnnnnnnnnnnnnnnnnnnnnnnnnnnnnnnnnnnnnnnnnnnnnnnnnnnnnnnnnnnnnnnnnnnnnnnnnnnnnnnnnnnnnnnnnnnnnnnnnnnnnnnnnnnnnnnnnnnnnnnnnnnnnnnnnnnnnnnnnnnnnnnnnnnnnnnnnnnnnnnnnnnnnnnnnnnnnnnnnnnnnnnnnnnnnnnnnnnnnnnnnnnnnnnnnnnnnnnnnnnnnnnnnnnnnnnnnnnnnnnnnnnnnnnnnnnnnnnnnnnnnnnnnnnnnnnnnnnnnnnnnnnnnnnnnnnnnnnnnnnnnnnnnnnnnnnnnnnnnnnnnnnnnnnnnnnnnnnnnnnnnnnnnnnnnnnnnnnnnnnnnnnnnnnnnnnnnnnnnnnnnnnnnnnnnnnnnnnnnnnnnnnnnnnnnnnnnnnnnnnnnnnnnnnnnnnnnnnnnnnnnnnnnnnnnnnnnnnnnnnnnnnnnnnnnnnnnnnnnnnnnnnnnnnnnnnnnnnnnnnnnnnnnnnnnnnnnnnnnnnnnnnnnnnnnnnnnnnnnnnnnnnnnnnnnnnnnnnnnnnnnnnnnnnnnnnnnnnnnnnnnnnnnnnnnnnnnnnnnnnnnnnnnnnnnnnnnnnnnnnnnnnnnnnnnnnnnnnnnnnnnnnnnnnnnnnnnnnnnnnnnnnnnnnnnnnnnnnnnnnnnnnnnnnnnnnnnnnnnnnnnnnnnnnnnnnnnnnnnnnnnnnnnnnnnnnnnnnnnnnnnnnnnnnnnnnnnnnnnnnnnnnnnnnnnnnnnnnnnnnnnnnnnnnnnnnnnnnnnnnnnnnnnnnnnnnnnnnnnnnnnnnnnnnnnnnnnnnnnnnnnnnnnnnnnnnnnnnnnnnnnnnnnnnnnnnnnnnnnnnnnnnnnnnnnnnnnnnnnnnnnnnnnnnnnnnnnnnnnnnnnnnnnnnnnnnnnnnnnnnnnnnnnnnnnnnnnnnnnnnnnnnnnnnnnnnnnnnnnnnnnnnnnnnnnnnnnnnnnnnnnnnnnnnnnnnnnnnnnnnnnnnnnnnnnnnnnnnnnnnnnnnnnnnnnnnnnnnnnnnnnnnnnnnnnnnnnnnnnnnnnnnnnnnnnnnnnnnnnnnnnnnnnnnnnnnnnnnnnnnnnnnnnnnnnnnnnnnnnnnnnnnnnnnnnnnnnnnnnnnnnnnnnnnnnnnnnnnnnnnnnnnnnnnnnnnnnnnnnnnnnnnnnnnnnnnnnnnnnnnnnnnnnnnnnnnnnnnnnnnnnnnnnnnnnnnnnnnnnnnnnnnnnnnnnnnnnnnnnnnnnnnnnnnnnnnnnnnnnnnnnnnnnnnnnnnnnnnnnnnnnnnnnnnnnnnnnnnnnnnnnnnnnnnnnnnnnnnnnnnnnnnnnnnnnnnnnnnnnnnnnnnnnnnnnnnnnnnnnnnnnnnnnnnnnnnnnnnnnnnnnnnnnnnnnnnnnnnnnnnnnnnnnnnnnnnnnnnnnnnnnnnnnnnnnnnnnnnnnnnnnnnnnnnnnnnnnnnnnnnnnnnnnnnnnnnnnnnnnnnnnnnnnnnnnnnnnnnnnnnnnnnnnnnnnnnnnnnnnnnnnnnnnnnnnnnnnnnnnnnnnnnnnnnnnnnnnnnnnnnnnnnnnnnnnnnnnnnnnnnnnnnnnnnnnnnnnnnnnnnnnnnnnnnnnnnnnnnnnnnnnnnnnnnnnnnnnnnnnnnnnnnnnnnnnnnnnnnnnnnnnnnnnnnnnnnnnnnnnnnnnnnnnnnnnnnnnnnnnnnnnnnnnnnnnnnnnnnnnnnnnnnnnnnnnnnnnnnnnnnnnnnnnnnnnnnnnnnnnnnnnnnnnnnnnnnnnnnnnnnnnnnnnnnnnnnnnnnnnnnnnnnnnnnnnnnnnnnnnnnnnnnnnnnnnnnnnnnnnnnnnnnnnnnnnnnnnnnnnnnnnnnnnnnnnnnnnnnnnnnnnnnnnnnnnnnnnnnnnnnnnnnnnnnnnnnnnnnnnnnnnnnnnnnnnnnnnnnnnnnnnnnnnnnnnnnnnnnnnnnnnnnnnnnnnnnnnnnnnnnnnnnnnnnnnnnnnnnnnnnnnnnnnnnnnnnnnnnnnnnnnnnnnnnnnnnnnnnnnnnnnnnnnnnnnnnnnnnnnnnnnnnnnnnnnnnnnnnnnnnnnnnnnnnnnnnnnnnnnnnnnnnnnnnnnnnnnnnnnnnnnnnnnnnnnnnnnnnnnnnnnnnnnnnnnnnnnnnnnnnnnnnnnnnnnnnnnnnnnnnnnnnnnnnnnnnnnnnnnnnnnnnnnnnnnnnnnnnnnnnnnnnnnnnnnnnnnnnnnnnnnnnnnnnnnnnnnnnnnnnnnnnnnnnnnnnnnnnnnnnnnnnnnnnnnnnnnnnnnnnnnnnnnnnnnnnnnnnnnnnnnnnnnnnnnnnnnnnnnnnnnnnnnnnnnnnnnnnnnnnnnnnnnnnnnnnnnnnnnnnnnnnnnnnnnnnnnnnnnnnnnnnnnnnnnnnnnnnnnnnnnnnnnnnnnnnnnnnnnnnnnnnnnnnnnnnnnnnnnnnnnnnnnnnnnnnnnnnnnnnnnnnnnnnnnnnnnnnnnnnnnnnnnnnnnnnnnnnnnnnnnnnnnnnnnnnnnnnnnnnnnnnnnnnnnnnnnnnnnnnnnnnnnnnnnnnnnnnnnnnnnnnnnnnnnnnnnnnnnnnnnnnnnnnnnnnnnnnnnnnnnnnnnnnnnnnnnnnnnnnnnnnnnnnnnnnnnnnnnnnnnnnnnnnnnnnnnnnnnnnnnnnnnnnnnnnnnnnnnnnnnnnnnnnnnnnnnnnnnnnnnnnnnnnnnnnnnnnnnnnnnnnnnnnnnnnnnnnnnnnnnnnnnnnnnnnnnnnnnnnnnnnnnnnnnnnnnnnnnnnnnnnnnnnnnnnnnnnnnnnnnnnnnnnnnnnnnnnnnnnnnnnnnnnnnnnnnnnnnnnnnnnnnnnnnnnnnnnnnnnnnnnnnnnnnnnnnnnnnnnnnnnnnnnnnnnnnnnnnnnnnnnnnnnnnnnnnnnnnnnnnnnnnnnnnnnnnnnnnnnnnnnnnnnnnnnnnnnnnnnnnnnnnnnnnnnnnnnnnnnnnnnnnnnnnnnnnnnnnnnnnnnnnnnnnnnnnnnnnnnnnnnnnnnnnnnnnnnnnnnnnnnnnnnnnnnnnnnnnnnnnnnnnnnnnnnnnnnnnnnnnnnnnnnnnnnnnnnnnnnnnnnnnnnnnnnnnnnnnnnnnnnnnnnnnnnnnnnnnnnnnnnnnnnnnnnnnnnnnnnnnnnnnnnnnnnnnnnnnnnnnnnnnnnnnnnnnnnnnnnnnnnnnnnnnnnnnnnnnnnnnnnnnnnnnnnnnnnnnnnnnnnnnnnnnnnnnnnnnnnnnnnnnnnnnnnnnnnnnnnnnnnnnnnnnnnnnnnnnnnnnnnnnnnnnnnnnnnnnnnnnnnnnnnnnnnnnnnnnnnnnnnnnnnnnnnnnnnnnnnnnnnnnnnnnnnnnnnnnnnnnnnnnnnnnnnnnnnnnnnnnnnnnnnnnnnnnnnnnnnnnnnnnnnnnnnnnnnnnnnnnnnnnnnnnnnnnnnnnnnnnnnnnnnnnnnnnnnnnnnnnnnnnnnnnnnnnnnnnnnnnnnnnnnnnnnnnnnnnnnnnnnnnnnnnnnnnnnnnnnnnnnnnnnnnnnnnnnnnnnnnnnnnnnnnnnnnnnnnnnnnnnnnnnnnnnnnnnnnnnnnnnnnnnnnnnnnnnnnnnnnnnnnnnnnnnnnnnnnnnnnnnnnnnnnnnnnnnnnnnnnnnnnnnnnnnnnnnnnnnnnnnnnnnnnnnnnnnnnnnnnnnnnnnnnnnnnnnnnnnnnnnnnnnnnnnnnnnnnnnnnnnnnnnnnnnnnnnnnnnnnnnnnnnnnnnnnnnnnnnnnnnnnnnnnnnnnnnnnnnnnnnnnnnnnnnnnnnnnnnnnnnnnnnnnnnnnnnnnnnnnnnnnnnnnnnnnnnnnnnnnnnnnnnnnnnnnnnnnnnnnnnnnnnnnnnnnnnnnnnnnnnnnnnnnnnnnnnnnnnnnnnnnnnnnnnnnnnnnnnnnnnnnnnnnnnnnnnnnnnnnnnnnnnnnnnnnnnnnnnnnnnnnnnnnnnnnnnnnnnnnnnnnnnnnnnnnnnnnnnnnnnnnnnnnnnnnnnnnnnnnnnnnnnnnnnnnnnnnnnnnnnnnnnnnnnnnnnnnnnnnnnnnnnnnnnnnnnnnnnnnnnnnnnnnnnnnnnnnnnnnnnnnnnnnnnnnnnnnnnnnnnnnnnnnnnnnnnnnnnnnnnnnnnnnnnnnnnnnnnnnnnnnnnnnnnnnnnnnnnnnnnnnnnnnnnnnnnnnnnnnnnnnnnnnnnnnnnnnnnnnnnnnnnnnnnnnnnnnnnnnnnnnnnnnnnnnnnnnnnnnnnnnnnnnnnnnnnnnnnnnnnnnnnnnnnnnnnnnnnnnnnnnnnnnnnnnnnnnnnnnnnnnnnnnnnnnnnnnnnnnnnnnnnnnnnnnnnnnnnnnnnnnnnnnnnnnnnnnnnnnnnnnnnnnnnnnnnnnnnnnnnnnnnnnnnnnnnnnnnnnnnnnnnnnnnnnnnnnnnnnnnnnnnnnnnnnnnnnnnnnnnnnnnnnnnnnnnnnnnnnnnnnnnnnnnnnnnnnnnnnnnnnnnnnnnnnnnnnnnnnnnnnnnnnnnnnnnnnnnnnnnnnnnnnnnnnnnnnnnnnnnnnnnnnnnnnnnnnnnnnnnnnnnnnnnnnnnnnnnnnnnnnnnnnnnnnnnnnnnnnnnnnnnnnnnnnnnnnnnnnnnnnnnnnnnnnnnnnnnnnnnnnnnnnnnnnnnnnnnnnnnnnnnnnnnnnnnnnnnnnnnnnnnnnnnnnnnnnnnnnnnnnnnnnnnnnnnnnnnnnnnnnnnnnnnnnnnnnnnnnnnnnnnnnnnnnnnnnnnnnnnnnnnnnnnnnnnnnnnnnnnnnnnnnnnnnnnnnnnnnnnnnnnnnnnnnnnnnnnnnnnnnnnnnnnnnnnnnnnnnnnnnnnnnnnnnnnnnnnnnnnnnnnnnnnnnnnnnnnnnnnnnnnnnnnnnnnnnnnnnnnnnnnnnnnnnnnnnnnnnnnnnnnnnnnnnnnnnnnnnnnnnnnnnnnnnnnnnnnnnnnnnnnnnnnnnnnnnnnnnnnnnnnnnnnnnnnnnnnnnnnnnnnnnnnnnnnnnnnnnnnnnnnnnnnnnnnnnnnnnnnnnnnnnnnnnnnnnnnnnnnnnnnnnnnnnnnnnnnnnnnnnnnnnnnnnnnnnnnnnnnnnnnnnnnnnnnnnnnnnnnnnnnnnnnnnnnnnnnnnnnnnnnnnnnnnnnnnnnnnnnnnnnnnnnnnnnnnnnnnnnnnnnnnnnnnnnnnnnnnnnnnnnnnnnnnnnnnnnnnnnnnnnnnnnnnnnnnnnnnnnnnnnnnnnnnnnnnnnnnnnnnnnnnnnnnnnnnnnnnnnnnnnnnnnnnnnnnnnnnnnnnnnnnnnnnnnnnnnnnnnnnnnnnnnnnnnnnnnnnnnnnnnnnnnnnnnnnnnnnnnnnnnnnnnnnnnnnnnnnnnnnnnnnnnnnnnnnnnnnnnnnnnnnnnnnnnnnnnnnnnnnnnnnnnnnnnnnnnnnnnnnnnnnnnnnnnnnnnnnnnnnnnnnnnnnnnnnnnnnnnnnnnnnnnnnnnnnnnnnnnnnnnnnnnnnnnnnnnnnnnnnnnnnnnnnnnnnnnnnnnnnnnnnnnnnnnnnnnnnnnnnnnnnnnnnnnnnnnnnnnnnnnnnnnnnnnnnnnnnnnnnnnnnnnnnnnnnnnnnnnnnnnnnnnnnnnnnnnnnnnnnnnnnnnnnnnnnnnnnnnnnnnnnnnnnnnnnnnnnnnnnnnnnnnnnnnnnnnnnnnnnnnnnnnnnnnnnnnnnnnnnnnnnnnnnnnnnnnnnnnnnnnnnnnnnnnnnnnnnnnnnnnnnnnnnnnnnnnnnnnnnnnnnnnnnnnnnnnnnnnnnnnnnnnnnnnnnnnnnnnnnnnnnnnnnnnnnnnnnnnnnnnnnnnnnnnnnnnnnnnnnnnnnnnnnnnnnnnnnnnnnnnnnnnnnnnnnnnnnnnnnnnnnnnnnnnnnnnnnnnnnnnnnnnnnnnnnnnnnnnnnnnnnnnnnnnnnnnnnnnnnnnnnnnnnnnnnnnnnnnnnnnnnnnnnnnnnnnnnnnnnnnnnnnnnnnnnnnnnnnnnnnnnnnnnnnnnnnnnnnnnnnnnnnnnnnnnnnnnnnnnnnnnnnnnnnnnnnnnnnnnnnnnnnnnnnnnnnnnnnnnnnnnnnnnnnnnnnnnnnnnnnnnnnnnnnnnnnnnnnnnnnnnnnnnnnnnnnnnnnnnnnnnnnnnnnnnnnnnnnnnnnnnnnnnnnnnnnnnnnnnnnnnnnnnnnnnnnnnnnnnnnnnnnnnnnnnnnnnnnnnnnnnnnnnnnnnnnnnnnnnnnnnnnnnnnnnnnnnnnnnnnnnnnnnnnnnnnnnnnnnnnnnnnnnnnnnnnnnnnnnnnnnnnnnnnnnnnnnnnnnnnnnnnnnnnnnnnnnnnnnnnnnnnnnnnnnnnnnnnnnnnnnnnnnnnnnnnnnnnnnnnnnnnnnnnnnnnnnnnnnnnnnnnnnnnnnnnnnnnnnnnnnnnnnnnnnnnnnnnnnnnnnnnnnnnnnnnnnnnnnnnnnnnnnnnnnnnnnnnnnnnnnnnnnnnnnnnnnnnnnnnnnnnnnnnnnnnnnnnnnnnnnnnnnnnnnnnnnnnnnnnnnnnnnnnnnnnnnnnnnnnnnnnnnnnnnnnnnnnnnnnnnnnnnnnnnnnnnnnnnnnnnnnnnnnnnnnnnnnnnnnnnnnnnnnnnnnnnnnnnnnnnnnnnnnnnnnnnnnnnnnnnnnnnnnnnnnnnnnnnnnnnnnnnnnnnnnnnnnnnnnnnnnnnnnnnnnnnnnnnnnnnnnnnnnnnnnnnnnnnnnnnnnnnnnnnnnnnnnnnnnnnnnnnnnnnnnnnnnnnnnnnnnnnnnnnnnnnnnnnnnnnnnnnnnnnnnnnnnnnnnnnnnnnnnnnnnnnnnnnnnnnnnnnnnnnnnnnnnnnnnnnnnnnnnnnnnnnnnnnnnnnnnnnnnnnnnnnnnnnnnnnnnnnnnnnnnnnnnnnnnnnnnnnnnnnnnnnnnnnnnnnnnnnnnnnnnnnnnnnnnnnnnnnnnnnnnnnnnnnnnnnnnnnnnnnnnnnnnnnnnnnnnnnnnnnnnnnnnnnnnnnnnnnnnnnnnnnnnnnnnnnnnnnnnnnnnnnnnnnnnnnnnnnnnnnnnnnnnnnnnnnnnnnnnnnnnnnnnnnnnnnnnnnnnnnnnnnnnnnnnnnnnnnnnnnnnnnnnnnnnnnnnnnnnnnnnnnnnnnnnnnnnnnnnnnnnnnnnnnnnnnnnnnnnnnnnnnnnnnnnnnnnnnnnnnnnnnnnnnnnnnnnnnnnnnnnnnnnnnnnnnnnnnnnnnnnnnnnnnnnnnnnnnnnnnnnnnnnnnnnnnnnnnnnnnnnnnnnnnnnnnnnnnnnnnnnnnnnnnnnnnnnnnnnnnnnnnnnnnnnnnnnnnnnnnnnnnnnnnnnnnnnnnnnnnnnnnnnnnnnnnnnnnnnnnnnnnnnnnnnnnnnnnnnnnnnnnnnnnnnnnnnnnnnnnnnnnnnnnnnnnnnnnnnnnnnnnnnnnnnnnnnnnnnnnnnnnnnnnnnnnnnnnnnnnnnnnnnnnnnnnnnnnnnnnnnnnnnnnnnnnnnnnnnnnnnnnnnnnnnnnnnnnnnnnnnnnnnnnnnnnnnnnnnnnnnnnnnnnnnnnnnnnnnnnnnnnnnnnnnnnnnnnnnnnnnnnnnnnnnnnnnnnnnnnnnnnnnnnnnnnnnnnnnnnnnnnnnnnnnnnnnnnnnnnnnnnnnnnnnnnnnnnnnnnnnnnnnnnnnnnnnnnnnnnnnnnnnnnnnnnnnnnnnnnnnnnnnnnnnnnnnnnnnnnnnnnnnnnnnnnnnnnnnnnnnnnnnnnnnnnnnnnnnnnnnnnnnnnnnnnnnnnnnnnnnnnnnnnnnnnnnnnnnnnnnnnnnnnnnnnnnnnnnnnnnnnnnnnnnnnnnnnnnnnnnnnnnnnnnnnnnnnnnnnnnnnnnnnnnnnnnnnnnnnnnnnnnnnnnnnnnnnnnnnnnnnnnnnnnnnnnnnnnnnnnnnnnnnnnnnnnnnnnnnnnnnnnnnnnnnnnnnnnnnnnnnnnnnnnnnnnnnnnnnnnnnnnnnnnnnnnnnnnnnnnnnnnnnnnnnnnnnnnnnnnnnnnnnnnnnnnnnnnnnnnnnnnnnnnnnnnnnnnnnnnnnnnnnnnnnnnnnnnnnnnnnnnnnnnnnnnnnnnnnnnnnnnnnnnnnnnnnnnnnnnnnnnnnnnnnnnnnnnnnnnnnnnnnnnnnnnnnnnnnnnnnnnnnnnnnnnnnnnnnnnnnnnnnnnnnnnnnnnnnnnnnnnnnnnnnnnnnnnnnnnnnnnnnnnnnnnnnnnnnnnnnnnnnnnnnnnnnnnnnnnnnnnnnnnnnnnnnnnnnnnnnnnnnnnnnnnnnnnnnnnnnnnnnnnnnnnnnnnnnnnnnnnnnnnnnnnnnnnnnnnnnnnnnnnnnnnnnnnnnnnnnnnnnnnnnnnnnnnnnnnnnnnnnnnnnnnnnnnnnnnnnnnnnnnnnnnnnnnnnnnnnnnnnnnnnnnnnnnnnnnnnnnnnnnnnnnnnnnnnnnnnnnnnnnnnnnnnnnnnnnnnnnnnnnnnnnnnnnnnnnnnnnnnnnnnnnnnnnnnnnnnnnnnnnnnnnnnnnnnnnnnnnnnnnnnnnnnnnnnnnnnnnnnnnnnnnnnnnnnnnnnnnnnnnnnnnnnnnnnnnnnnnnnnnnnnnnnnnnnnnnnnnnnnnnnnnnnnnnnnnnnnnnnnnnnnnnnnnnnnnnnnnnnnnnnnnnnnnnnnnnnnnnnnnnnnnnnnnnnnnnnnnnnnnnnnnnnnnnnnnnnnnnnnnnnnnnnnnnnnnnnnnnnnnnnnnnnnnnnnnnnnnnnnnnnnnnnnnnnnnnnnnnnnnnnnnnnnnnnnnnnnnnnnnnnnnnnnnnnnnnnnnnnnnnnnnnnnnnnnnnnnnnnnnnnnnnnnnnnnnnnnnnnnnnnnnnnnnnnnnnnnnnnnnnnnnnnnnnnnnnnnnnnnnnnnnnnnnnnnnnnnnnnnnnnnnnnnnnnnnnnnnnnnnnnnnnnnnnnnnnnnnnnnnnnnnnnnnnnnnnnnnnnnnnnnnnnnnnnnnnnnnnnnnnnnnnnnnnnnnnnnnnnnnnnnnnnnnnnnnnnnnnnnnnnnnnnnnnnnnnnnnnnnnnnnnnnnnnnnnnnnnnnnnnnnnnnnnnnnnnnnnnnnnnnnnnnnnnnnnnnnnnnnnnnnnnnnnnnnnnnnnnnnnnnnnnnnnnnnnnnnnnnnnnnnnnnnnnnnnnnnnnnnnnnnnnnnnnnnnnnnnnnnnnnnnnnnnnnnnnnnnnnnnnnnnnnnnnnnnnnnnnnnnnnnnnnnnnnnnnnnnnnnnnnnnnnnnnnnnnnnnnnnnnnnnnnnnnnnnnnnnnnnnnnnnnnnnnnnnnnnnnnnnnnnnnnnnnnnnnnnnnnnnnnnnnnnnnnnnnnnnnnnnnnnnnnnnnnnnnnnnnnnnnnnnnnnnnnnnnnnnnnnnnnnnnnnnnnnnnnnnnnnnnnnnnnnnnnnnnnnnnnnnnnnnnnnnnnnnnnnnnnnnnnnnnnnnnnnnnnnnnnnnnnnnnnnnnnnnnnnnnnnnnnnnnnnnnnnnnnnnnnnnnnnnnnnnnnnnnnnnnnnnnnnnnnnnnnnnnnnnnnnnnnnnnnnnnnnnnnnnnnnnnnnnnnnnnnnnnnnnnnnnnnnnnnnnnnnnnnnnnnnnnnnnnnnnnnnnnnnnnnnnnnnnnnnnnnnnnnnnnnnnnnnnnnnnnnnnnnnnnnnnnnnnnnnnnnnnnnnnnnnnnnnnnnnnnnnnnnnnnnnnnnnnnnnnnnnnnnnnnnnnnnnnnnnnnnnnnnnnnnnnnnnnnnnnnnnnnnnnnnnnnnnnnnnnnnnnnnnnnnnnnnnnnnnnnnnnnnnnnnnnnnnnnnnnnnnnnnnnnnnnnnnnnnnnnnnnnnnnnnnnnnnnnnnnnnnnnnnnnnnnnnnnnnnnnnnnnnnnnnnnnnnnnnnnnnnnnnnnnnnnnnnnnnnnnnnnnnnnnnnnnnnnnnnnnnnnnnnnnnnnnnnnnnnnnnnnnnnnnnnnnnnnnnnnnnnnnnnnnnnnnnnnnnnnnnnnnnnnnnnnnnnnnnnnnnnnnnnnnnnnnnnnnnnnnnnnnnnnnnnnnnnnnnnnnnnnnnnnnnnnnnnnnnnnnnnnnnnnnnnnnnnnnnnnnnnnnnnnnnnnnnnnnnnnnnnnnnnnnnnnnnnnnnnnnnnnnnnnnnnnnnnnnnnnnnnnnnnnnnnnnnnnnnnnnnnnnnnnnnnnnnnnnnnnnnnnnnnnnnnnnnnnnnnnnnnnnnnnnnnnnnnnnnnnnnnnnnnnnnnnnnnnnnnnnnnnnnnnnnnnnnnnnnnnnnnnnnnnnnnnnnnnnnnnnnnnnnnnnnnnnnnnnnnnnnnnnnnnnnnnnnnnnnnnnnnnnnnnnnnnnnnnnnnnnnnnnnnnnnnnnnnnnnnnnnnnnnnnnnnnnnnnnnnnnnnnnnnnnnnnnnnnnnnnnnnnnnnnnnnnnnnnnnnnnnnnnnnnnnnnnnnnnnnnnnnnnnnnnnnnnnnnnnnnnnnnnnnnnnnnnnnnnnnnnnnnnnnnnnnnnnnnnnnnnnnnnnnnnnnnnnnnnnnnnnnnnnnnnnnnnnnnnnnnnnnnnnnnnnnnnnnnnnnnnnnnnnnnnnnnnnnnnnnnnnnnnnnnnnnnnnnnnnnnnnnnnnnnnnnnnnnnnnnnnnnnnnnnnnnnnnnnnnnnnnnnnnnnnnnnnnnnnnnnnnnnnnnnnnnnnnnnnnnnnnnnnnnnnnnnnnnnnnnnnnnnnnnnnnnnnnnnnnnnnnnnnnnnnnnnnnnnnnnnnnnnnnnnnnnnnnnnnnnnnnnnnnnnnnnnnnnnnnnnnnnnnnnnnnnnnnnnnnnnnnnnnnnnnnnnnnnnnnnnnnnnnnnnnnnnnnnnnnnnnnnnnnnnnnnnnnnnnnnnnnnnnnnnnnnnnnnnnnnnnnnnnnnnnnnnnnnnnnnnnnnnnnnnnnnnnnnnnnnnnnnnnnnnnnnnnnnnnnnnnnnnnnnnnnnnnnnnnnnnnnnnnnnnnnnnnnnnnnnnnnnnnnnnnnnnnnnnnnnnnnnnnnnnnnnnnnnnnnnnnnnnnnnnnnnnnnnnnnnnnnnnnnnnnnnnnnnnnnnnnnnnnnnnnnnnnnnnnnnnnnnnnnnnnnnnnnnnnnnnnnnnnnnnnnnnnnnnnnnnnnnnnnnnnnnnnnnnnnnnnnnnnnnnnnnnnnnnnnnnnnnnnnnnnnnnnnnnnnnnnnnnnnnnnnnnnnnnnnnnnnnnnnnnnnnnnnnnnnnnnnnnnnnnnnnnnnnnnnnnnnnnnnnnnnnnnnnnnnnnnnnnnnnnnnnnnnnnnnnnnnnnnnnnnnnnnnnnnnnnnnnnnnnnnnnnnnnnnnnnnnnnnnnnnnnnnnnnnnnnnnnnnnnnnnnnnnnnnnnnnnnnnnnnnnnnnnnnnnnnnnnnnnnnnnnnnnnnnnnnnnnnnnnnnnnnnnnnnnnnnnnnnnnnnnnnnnnnnnnnnnnnnnnnnnnnnnnnnnnnnnnnnnnnnnnnnnnnnnnnnnnnnnnnnnnnnnnnnnnnnnnnnnnnnnnnnnnnnnnnnnnnnnnnnnnnnnnnnnnnnnnnnnnnnnnnnnnnnnnnnnnnnnnnnnnnnnnnnnnnnnnnnnnnnnnnnnnnnnnnnnnnnnnnnnnnnnnnnnnnnnnnnnnnnnnnnnnnnnnnnnnnnnnnnnnnnnnnnnnnnnnnnnnnnnnnnnnnnnnnnnnnnnnnnnnnnnnnnnnnnnnnnnnnnnnnnnnnnnnnnnnnnnnnnnnnnnnnnnnnnnnnnnnnnnnnnnnnnnnnnnnnnnnnnnnnnnnnnnnnnnnnnnnnnnnnnnnnnnnnnnnnnnnnnnnnnnnnnnnnnnnnnnnnnnnnnnnnnnnnnnnnnnnnnnnnnnnnnnnnnnnnnnnnnnnnnnnnnnnnnnnnnnnnnnnnnnnnnnnnnnnnnnnnnnnnnnnnnnnnnnnnnnnnnnnnnnnnnnnnnnnnnnnnnnnnnnnnnnnnnnnnnnnnnnnnnnnnnnnnnnnnnnnnnnnnnnnnnnnnnnnnnnnnnnnnnnnnnnnnnnnnnnnnnnnnnnnnnnnnnnnnnnnnnnnnnnnnnnnnnnnnnnnnnnnnnnnnnnnnnnnnnnnnnnnnnnnnnnnnnnnnnnnnnnnnnnnnnnnnnnnnnnnnnnnnnnnnnnnnnnnnnnnnnnnnnnnnnnnnnnnnnnnnnnnnnnnnnnnnnnnnnnnnnnnnnnnnnnnnnnnnnnnnnnnnnnnnnnnnnnnnnnnnnnnnnnnnnnnnnnnnnnnnnnnnnnnnnnnnnnnnnnnnnnnnnnnnnnnnnnnnnnnnnnnnnnnnnnnnnnnnnnnnnnnnnnnnnnnnnnnnnnnnnnnnnnnnnnnnnnnnnnnnnnnnnnnnnnnnnnnnnnnnnnnnnnnnnnnnnnnnnnnnnnnnnnnnnnnnnnnnnnnnnnnnnnnnnnnnnnnnnnnnnnnnnnnnnnnnnnnnnnnnnnnnnnnnnnnnnnnnnnnnnnnnnnnnnnnnnnnnnnnnnnnnnnnnnnnnnnnnnnnnnnnnnnnnnnnnnnnnnnnnnnnnnnnnnnnnnnnnnnnnnnnnnnnnnnnnnnnnnnnnnnnnnnnnnnnnnnnnnnnnnnnnnnnnnnnnnnnnnnnnnnnnnnnnnnnnnnnnnnnnnnnnnnnnnnnnnnnnnnnnnnnnnnnnnnnnnnnnnnnnnnnnnnnnnnnnnnnnnnnnnnnnnnnnnnnnnnnnnnnnnnnnnnnnnnnnnnnnnnnnnnnnnnnnnnnnnnnnnnnnnnnnnnnnnnnnnnnnnnnnnnnnnnnnnnnnnnnnnnnnnnnnnnnnnnnnnnnnnnnnnnnnnnnnnnnnnnnnnnnnnnnnnnnnnnnnnnnnnnnnnnnnnnnnnnnnnnnnnnnnnnnnnnnnnnnnnnnnnnnnnnnnnnnnnnnnnnnnnnnnnnnnnnnnnnnnnnnnnnnnnnnnnnnnnnnnnnnnnnnnnnnnnnnnnnnnnnnnnnnnnnnnnnnnnnnnnnnnnnnnnnnnnnnnnnnnnnnnnnnnnnnnnnnnnnnnnnnnnnnnnnnnnnnnnnnnnnnnnnnnnnnnnnnnnnnnnnnnnnnnnnnnnnnnnnnnnnnnnnnnnnnnnnnnnnnnnnnnnnnnnnnnnnnnnnnnnnnnnnnnnnnnnnnnnnnnnnnnnnnnnnnnnnnnnnnnnnnnnnnnnnnnnnnnnnnnnnnnnnnnnnnnnnnnnnnnnnnnnnnnnnnnnnnnnnnnnnnnnnnnnnnnnnnnnnnnnnnnnnnnnnnnnnnnnnnnnnnnnnnnnnnnnnnnnnnnnnnnnnnnnnnnnnnnnnnnnnnnnnnnnnnnnnnnnnnnnnnnnnnnnnnnnnnnnnnnnnnnnnnnnnnnnnnnnnnnnnnnnnnnnnnnnnnnnnnnnnnnnnnnnnnnnnnnnnnnnnnnnnnnnnnnnnnnnnnnnnnnnnnnnnnnnnnnnnnnnnnnnnnnnnnnnnnnnnnnnnnnnnnnnnnnnnnnnnnnnnnnnnnnnnnnnnnnnnnnnnnnnnnnnnnnnnnnnnnnnnnnnnnnnnnnnnnnnnnnnnnnnnnnnnnnnnnnnnnnnnnnnnnnnnnnnnnnnnnnnnnnnnnnnnnnnnnnnnnnnnnnnnnnnnnnnnnnnnnnnnnnnnnnnnnnnnnnnnnnnnnnnnnnnnnnnnnnnnnnnnnnnnnnnnnnnnnnnnnnnnnnnnnnnnnnnnnnnnnnnnnnnnnnnnnnnnnnnnnnnnnnnnnnnnnnnnnnnnnnnnnnnnnnnnnnnnnnnnnnnnnnnnnnnnnnnnnnnnnnnnnnnnnnnnnnnnnnnnnnnnnnnnnnnnnnnnnnnnnnnnnnnnnnnnnnnnnnnnnnnnnnnnnnnnnnnnnnnnnnnnnnnnnnnnnnnnnnnnnnnnnnnnnnnnnnnnnnnnnnnnnnnnnnnnnnnnnnnnnnnnnnnnnnnnnnnnnnnnnnnnnnnnnnnnnnnnnnnnnnnnnnnnnnnnnnnnnnnnnnnnnnnnnnnnnnnnnnnnnnnnnnnnnnnnnnnnnnnnnnnnnnnnnnnnnnnnnnnnnnnnnnnnnnnnnnnnnnnnnnnnnnnnnnnnnnnnnnnnnnnnnnnnnnnnnnnnnnnnnnnnnnnnnnnnnnnnnnnnnnnnnnnnnnnnnnnnnnnnnnnnnnnnnnnnnnnnnnnnnnnnnnnnnnnnnnnnnnnnnnnnnnnnnnnnnnnnnnnnnnnnnnnnnnnnnnnnnnnnnnnnnnnnnnnnnnnnnnnnnnnnnnnnnnnnnnnnnnnnnnnnnnnnnnnnnnnnnnnnnnnnnnnnnnnnnnnnnnnnnnnnnnnnnnnnnnnnnnnnnnnnnnnnnnnnnnnnnnnnnnnnnnnnnnnnnnnnnnnnnnnnnnnnnnnnnnnnnnnnnnnnnnnnnnnnnnnnnnnnnnnnnnnnnnnnnnnnnnnnnnnnnnnnnnnnnnnnnnnnnnnnnnnnnnnnnnnnnnnnnnnnnnnnnnnnnnnnnnnnnnnnnnnnnnnnnnnnnnnnnnnnnnnnnnnnnnnnnnnnnnnnnnnnnnnnnnnnnnnnnnnnnnnnnnnnnnnnnnnnnnnnnnnnnnnnnnnnnnnnnnnnnnnnnnnnnnnnnnnnnnnnnnnnnnnnnnnnnnnnnnnnnnnnnnnnnnnnnnnnnnnnnnnnnnnnnnnnnnnnnnnnnnnnnnnnnnnnnnnnnnnnnnnnnnnnnnnnnnnnnnnnnnnnnnnnnnnnnnnnnnnnnnnnnnnnnnnnnnnnnnnnnnnnnnnnnnnnnnnnnnnnnnnnnnnnnnnnnnnnnnnnnnnnnnnnnnnnnnnnnnnnnnnnnnnnnnnnnnnnnnnnnnnnnnnnnnnnnnnnnnnnnnnnnnnnnnnnnnnnnnnnnnnnnnnnnnnnnnnnnnnnnnnnnnnnnnnnnnnnnnnnnnnnnnnnnnnnnnnnnnnnnnnnnnnnnnnnnnnnnnnnnnnnnnnnnnnnnnnnnnnnnnnnnnnnnnnnnnnnnnnnnnnnnnnnnnnnnnnnnnnnnnnnnnnnnnnnnnnnnnnnnnnnnnnnnnnnnnnnnnnnnnnnnnnnnnnnnnnnnnnnnnnnnnnnnnnnnnnnnnnnnnnnnnnnnnnnnnnnnnnnnnnnnnnnnnnnnnnnnnnnnnnnnnnnnnnnnnnnnnnnnnnnnnnnnnnnnnnnnnnnnnnnnnnnnnnnnnnnnnnnnnnnnnnnnnnnnnnnnnnnnnnnnnnnnnnnnnnnnnnnnnnnnnnnnnnnnnnnnnnnnnnnnnnnnnnnnnnnnnnnnnnnnnnnnnnnnnnnnnnnnnnnnnnnnnnnnnnnnnnnnnnnnnnnnnnnnnnnnnnnnnnnnnnnnnnnnnnnnnnnnnnnnnnnnnnnnnnnnnnnnnnnnnnnnnnnnnnnnnnnnnnnnnnnnnnnnnnnnnnnnnnnnnnnnnnnnnnnnnnnnnnnnnnnnnnnnnnnnnnnnnnnnnnnnnnnnnnnnnnnnnnnnnnnnnnnnnnnnnnnnnnnnnnnnnnnnnnnnnnnnnnnnnnnnnnnnnnnnnnnnnnnnnnnnnnnnnnnnnnnnnnnnnnnnnnnnnnnnnnnnnnnnnnnnnnnnnnnnnnnnnnnnnnnnnnnnnnnnnnnnnnnnnnnnnnnnnnnnnnnnnnnnnnnnnnnnnnnnnnnnnnnnnnnnnnnnnnnnnnnnnnnnnnnnnnnnnnnnnnnnnnnnnnnnnnnnnnnnnnnnnnnnnnnnnnnnnnnnnnnnnnnnnnnnnnnnnnnnnnnnnnnnnnnnnnnnnnnnnnnnnnnnnnnnnnnnnnnnnnnnnnnnnnnnnnnnnnnnnnnnnnnnnnnnnnnnnnnnnnnnnnnnnnnnnnnnnnnnnnnnnnnnnnnnnnnnnnnnnnnnnnnnnnnnnnnnnnnnnnnnnnnnnnnnnnnnnnnnnnnnnnnnnnnnnnnnnnnnnnnnnnnnnnnnnnnnnnnnnnnnnnnnnnnnnnnnnnnnnnnnnnnnnnnnnnnnnnnnnnnnnnnnnnnnnnnnnnnnnnnnnnnnnnnnnnnnnnnnnnnnnnnnnnnnnnnnnnnnnnnnnnnnnnnnnnnnnnnnnnnnnnnnnnnnnnnnnnnnnnnnnnnnnnnnnnnnnnnnnnnnnnnnnnnnnnnnnnnnnnnnnnnnnnnnnnnnnnnnnnnnnnnnnnnnnnnnnnnnnnnnnnnnnnnnnnnnnnnnnnnnnnnnnnnnnnnnnnnnnnnnnnnnnnnnnnnnnnnnnnnnnnnnnnnnnnnnnnnnnnnnnnnnnnnnnnnnnnnnnnnnnnnnnnnnnnnnnnnnnnnnnnnnnnnnnnnnnnnnnnnnnnnnnnnnnnnnnnnnnnnnnnnnnnnnnnnnnnnnnnnnnnnnnnnnnnnnnnnnnnnnnnnnnnnnnnnnnnnnnnnnnnnnnnnnnnnnnnnnnnnnnnnnnnnnnnnnnnnnnnnnnnnnnnnnnnnnnnnnnnnnnnnnnnnnnnnnnnnnnnnnnnnnnnnnnnnnnnnnnnnnnnnnnnnnnnnnnnnnnnnnnnnnnnnnnnnnnnnnnnnnnnnnnnnnnnnnnnnnnnnnnnnnnnnnnnnnnnnnnnnnnnnnnnnnnnnnnnnnnnnnnnnnnnnnnnnnnnnnnnnnnnnnnnnnnnnnnnnnnnnnnnnnnnnnnnnnnnnnnnnnnnnnnnnnnnnnnnnnnnnnnnnnnnnnnnnnnnnnnnnnnnnnnnnnnnnnnnnnnnnnnnnnnnnnnnnnnnnnnnnnnnnnnnnnnnnnnnnnnnnnnnnnnnnnnnnnnnnnnnnnnnnnnnnnnnnnnnnnnnnnnnnnnnnnnnnnnnnnnnnnnnnnnnnnnnnnnnnnnnnnnnnnnnnnnnnnnnnnnnnnnnnnnnnnnnnnnnnnnnnnnnnnnnnnnnnnnnnnnnnnnnnnnnnnnnnnnnnnnnnnnnnnnnnnnnnnnnnnnnnnnnnnnnnnnnnnnnnnnnnnnnnnnnnnnnnnnnnnnnnnnnnnnnnnnnnnnnnnnnnnnnnnnnnnnnnnnnnnnnnnnnnnnnnnnnnnnnnnnnnnnnnnnnnnnnnnnnnnnnnnnnnnnnnnnnnnnnnnnnnnnnnnnnnnnnnnnnnnnnnnnnnnnnnnnnnnnnnnnnnnnnnnnnnnnnnnnnnnnnnnnnnnnnnnnnnnnnnnnnnnnnnnnnnnnnnnnnnnnnnnnnnnnnnnnnnnnnnnnnnnnnnnnnnnnnnnnnnnnnnnnnnnnnnnnnnnnnnnnnnnnnnnnnnnnnnnnnnnnnnnnnnnnnnnnnnnnnnnnnnnnnnnnnnnnnnnnnnnnnnnnnnnnnnnnnnnnnnnnnnnnnnnnnnnnnnnnnnnnnnnnnnnnnnnnnnnnnnnnnnnnnnnnnnnnnnnnnnnnnnnnnnnnnnnnnnnnnnnnnnnnnnnnnnnnnnnnnnnnnnnnnnnnnnnnnnnnnnnnnnnnnnnnnnnnnnnnnnnnnnnnnnnnnnnnnnnnnnnnnnnnnnnnnnnnnnnnnnnnnnnnnnnnnnnnnnnnnnnnnnnnnnnnnnnnnnnnnnnnnnnnnnnnnnnnnnnnnnnnnnnnnnnnnnnnnnnnnnnnnnnnnnnnnnnnnnnnnnnnnnnnnnnnnnnnnnnnnnnnnnnnnnnnnnnnnnnnnnnnnnnnnnnnnnnnnnnnnnnnnnnnnnnnnnnnnnnnnnnnnnnnnnnnnnnnnnnnnnnnnnnnnnnnnnnnnnnnnnnnnnnnnnnnnnnnnnnnnnnnnnnnnnnnnnnnnnnnnnnnnnnnnnnnnnnnnnnnnnnnnnnnnnnnnnnnnnnnnnnnnnnnnnnnnnnnnnnnnnnnnnnnnnnnnnnnnnnnnnnnnnnnnnnnnnnnnnnnnnnnnnnnnnnnnnnnnnnnnnnnnnnnnnnnnnnnnnnnnnnnnnnnnnnnnnnnnnnnnnnnnnnnnnnnnnnnnnnnnnnnnnnnnnnnnnnnnnnnnnnnnnnnnnnnnnnnnnnnnnnnnnnnnnnnnnnnnnnnnnnnnnnnnnnnnnnnnnnnnnnnnnnnnnnnnnnnnnnnnnnnnnnnnnnnnnnnnnnnnnnnnnnnnnnnnnnnnnnnnnnnnnnnnnnnnnnnnnnnnnnnnnnnnnnnnnnnnnnnnnnnnnnnnnnnnnnnnnnnnnnnnnnnnnnnnnnnnnnnnnnnnnnnnnnnnnnnnnnnnnnnnnnnnnnnnnnnnnnnnnnnnnnnnnnnnnnnnnnnnnnnnnnnnnnnnnnnnnnnnnnnnnnnnnnnnnnnnnnnnnnnnnnnnnnnnnnnnnnnnnnnnnnnnnnnnnnnnnnnnnnnnnnnnnnnnnnnnnnnnnnnnnnnnnnnnnnnnnnnnnnnnnnnnnnnnnnnnnnnnnnnnnnnnnnnnnnnnnnnnnnnnnnnnnnnnnnnnnnnnnnnnnnnnnnnnnnnnnnnnnnnnnnnnnnnnnnnnnnnnnnnnnnnnnnnnnnnnnnnnnnnnnnnnnnnnnnnnnnnnnnnnnnnnnnnnnnnnnnnnnnnnnnnnnnnnnnnnnnnnnnnnnnnnnnnnnnnnnnnnnnnnnnnnnnnnnnnnnnnnnnnnnnnnnnnnnnnnnnnnnnnnnnnnnnnnnnnnnnnnnnnnnnnnnnnnnnnnnnnnnnnnnnnnnnnnnnnnnnnnnnnnnnnnnnnnnnnnnnnnnnnnnnnnnnnnnnnnnnnnnnnnnnnnnnnnnnnnnnnnnnnnnnnnnnnnnnnnnnnnnnnnnnnnnnnnnnnnnnnnnnnnnnnnnnnnnnnnnnnnnnnnnnnnnnnnnnnnnnnnnnnnnnnnnnnnnnnnnnnnnnnnnnnnnnnnnnnnnnnnnnnnnnnnnnnnnnnnnnnnnnnnnnnnnnnnnnnnnnnnnnnnnnnnnnnnnnnnnnnnnnnnnnnnnnnnnnnnnnnnnnnnnnnnnnnnnnnnnnnnnnnnnnnnnnnnnnnnnnnnnnnnnnnnnnnnnnnnnnnnnnnnnnnnnnnnnnnnnnnnnnnnnnnnnnnnnnnnnnnnnnnnnnnnnnnnnnnnnnnnnnnnnnnnnnnnnnnnnnnnnnnnnnnnnnnnnnnnnnnnnnnnnnnnnnnnnnnnnnnnnnnnnnnnnnnnnnnnnnnnnnnnnnnnnnnnnnnnnnnnnnnnnnnnnnnnnnnnnnnnnnnnnnnnnnnnnnnnnnnnnnnnnnnnnnnnnnnnnnnnnnnnnnnnnnnnnnnnnnnnnnnnnnnnnnnnnnnnnnnnnnnnnnnnnnnnnnnnnnnnnnnnnnnnnnnnnnnnnnnnnnnnnnnnnnnnnnnnnnnnnnnnnnnnnnnnnnnnnnnnnnnnnnnnnnnnnnnnnnnnnnnnnnnnnnnnnnnnnnnnnnnnnnnnnnnnnnnnnnnnnnnnnnnnnnnnnnnnnnnnnnnnnnnnnnnnnnnnnnnnnnnnnnnnnnnnnnnnnnnnnnnnnnnnnnnnnnnnnnnnnnnnnnnnnnnnnnnnnnnnnnnnnnnnnnnnnnnnnnnnnnnnnnnnnnnnnnnnnnnnnnnnnnnnnnnnnnnnnnnnnnnnnnnnnnnnnnnnnnnnnnnnnnnnnnnnnnnnnnnnnnnnnnnnnnnnnnnnnnnnnnnnnnnnnnnnnnnnnnnnnnnnnnnnnnnnnnnnnnnnnnnnnnnnnnnnnnnnnnnnnnnnnnnnnnnnnnnnnnnnnnnnnnnnnnnnnnnnnnnnnnnnnnnnnnnnnnnnnnnnnnnnnnnnnnnnnnnnnnnnnnnnnnnnnnnnnnnnnnnnnnnnnnnnnnnnnnnnnnnnnnnnnnnnnnnnnnnnnnnnnnnnnnnnnnnnnnnnnnnnnnnnnnnnnnnnnnnnnnnnnnnnnnnnnnnnnnnnnnnnnnnnnnnnnnnnnnnnnnnnnnnnnnnnnnnnnnnnnnnnnnnnnnnnnnnnnnnnnnnnnnnnnnnnnnnnnnnnnnnnnnnnnnnnnnnnnnnnnnnnnnnnnnnnnnnnnnnnnnnnnnnnnnnnnnnnnnnnnnnnnnnnnnnnnnnnnnnnnnnnnnnnnnnnnnnnnnnnnnnnnnnnnnnnnnnnnnnnnnnnnnnnnnnnnnnnnnnnnnnnnnnnnnnnnnnnnnnnnnnnnnnnnnnnnnnnnnnnnnnnnnnnnnnnnnnnnnnnnnnnnnnnnnnnnnnnnnnnnnnnnnnnnnnnnnnnnnnnnnnnnnnnnnnnnnnnnnnnnnnnnnnnnnnnnnnnnnnnnnnnnnnnnnnnnnnnnnnnnnnnnnnnnnnnnnnnnnnnnnnnnnnnnnnnnnnnnnnnnnnnnnnnnnnnnnnnnnnnnnnnnnnnnnnnnnnnnnnnnnnnnnnnnnnnnnnnnnnnnnnnnnnnnnnnnnnnnnnnnnnnnnnnnnnnnnnnnnnnnnnnnnnnnnnnnnnnnnnnnnnnnnnnnnnnnnnnnnnnnnnnnnnnnnnnnnnnnnnnnnnnnnnnnnnnnnnnnnnnnnnnnnnnnnnnnnnnnnnnnnnnnnnnnnnnnnnnnnnnnnnnnnnnnnnnnnnnnnnnnnnnnnnnnnnnnnnnnnnnnnnnnnnnnnnnnnnnnnnnnnnnnnnnnnnnnnnnnnnnnnnnnnnnnnnnnnnnnnnnnnnnnnnnnnnnnnnnnnnnnnnnnnnnnnnnnnnnnnnnnnnnnnnnnnnnnnnnnnnnnnnnnnnnnnnnnnnnnnnnnnnnnnnnnnnnnnnnnnnnnnnnnnnnnnnnnnnnnnnnnnnnnnnnnnnnnnnnnnnnnnnnnnnnnnnnnnnnnnnnnnnnnnnnnnnnnnnnnnnnnnnnnnnnnnnnnnnnnnnnnnnnnnnnnnnnnnnnnnnnnnnnnnnnnnnnnnnnnnnnnnnnnnnnnnnnnnnnnnnnnnnnnnnnnnnnnnnnnnnnnnnnnnnnnnnnnnnnnnnnnnnnnnnnnnnnnnnnnnnnnnnnnnnnnnnnnnnnnnnnnnnnnnnnnnnnnnnnnnnnnnnnnnnnnnnnnnnnnnnnnnnnnnnnnnnnnnnnnnnnnnnnnnnnnnnnnnnnnnnnnnnnnnnnnnnnnnnnnnnnnnnnnnnnnnnnnnnnnnnnnnnnnnnnnnnnnnnnnnnnnnnnnnnnnnnnnnnnnnnnnnnnnnnnnnnnnnnnnnnnnnnnnnnnnnnnnnnnnnnnnnnnnnnnnnnnnnnnnnnnnnnnnnnnnnnnnnnnnnnnnnnnnnnnnnnnnnnnnnnnnnnnnnnnnnnnnnnnnnnnnnnnnnnnnnnnnnnnnnnnnnnnnnnnnnnnnnnnnnnnnnnnnnnnnnnnnnnnnnnnnnnnnnnnnnnnnnnnnnnnnnnnnnnnnnnnnnnnnnnnnnnnnnnnnnnnnnnnnnnnnnnnnnnnnnnnnnnnnnnnnnnnnnnnnnnnnnnnnnnnnnnnnnnnnnnnnnnnnnnnnnnnnnnnnnnnnnnnnnnnnnnnnnnnnnnnnnnnnnnnnnnnnnnnnnnnnnnnnnnnnnnnnnnnnnnnnnnnnnnnnnnnnnnnnnnnnnnnnnnnnnnnnnnnnnnnnnnnnnnnnnnnnnnnnnnnnnnnnnnnnnnnnnnnnnnnnnnnnnnnnnnnnnnnnnnnnnnnnnnnnnnnnnnnnnnnnnnnnnnnnnnnnnnnnnnnnnnnnnnnnnnnnnnnnnnnnnnnnnnnnnnnnnnnnnnnnnnnnnnnnnnnnnnnnnnnnnnnnnnnnnnnnnnnnnnnnnnnnnnnnnnnnnnnnnnnnnnnnnnnnnnnnnnnnnnnnnnnnnnnnnnnnnnnnnnnnnnnnnnnnnnnnnnnnnnnnnnnnnnnnnnnnnnnnnnnnnnnnnnnnnnnnnnnnnnnnnnnnnnnnnnnnnnnnnnnnnnnnnnnnnnnnnnnnnnnnnnnnnnnnnnnnnnnnnnnnnnnnnnnnnnnnnnnnnnnnnnnnnnnnnnnnnnnnnnnnnnnnnnnnnnnnnnnnnnnnnnnnnnnnnnnnnnnnnnnnnnnnnnnnnnnnnnnnnnnnnnnnnnnnnnnnnnnnnnnnnnnnnnnnnnnnnnnnnnnnnnnnnnnnnnnnnnnnnnnnnnnnnnnnnnnnnnnnnnnnnnnnnnnnnnnnnnnnnnnnnnnnnnnnnnnnnnnnnnnnnnnnnnnnnnnnnnnnnnnnnnnnnnnnnnnnnnnnnnnnnnnnnnnnnnnnnnnnnnnnnnnnnnnnnnnnnnnnnnnnnnnnnnnnnnnnnnnnnnnnnnnnnnnnnnnnnnnnnnnnnnnnnnnnnnnnnnnnnnnnnnnnnnnnnnnnnnnnnnnnnnnnnnnnnnnnnnnnnnnnnnnnnnnnnnnnnnnnnnnnnnnnnnnnnnnnnnnnnnnnnnnnnnnnnnnnnnnnnnnnnnnnnnnnnnnnnnnnnnnnnnnnnnnnnnnnnnnnnnnnnnnnnnnnnnnnnnnnnnnnnnnnnnnnnnnnnnnnnnnnnnnnnnnnnnnnnnnnnnnnnnnnnnnnnnnnnnnnnnnnnnnnnnnnnnnnnnnnnnnnnnnnnnnnnnnnnnnnnnnnnnnnnnnnnnnnnnnnnnnnnnnnnnnnnnnnnnnnnnnnnnnnnnnnnnnnnnnnnnnnnnnnnnnnnnnnnnnnnnnnnnnnnnnnnnnnnnnnnnnnnnnnnnnnnnnnnnnnnnnnnnnnnnnnnnnnnnnnnnnnnnnnnnnnnnnnnnnnnnnnnnnnnnnnnnnnnnnnnnnnnnnnnnnnnnnnnnnnnnnnnnnnnnnnnnnnnnnnnnnnnnnnnnnnnnnnnnnnnnnnnnnnnnnnnnnnnnnnnnnnnnnnnnnnnnnnnnnnnnnnnnnnnnnnnnnnnnnnnnnnnnnnnnnnnnnnnnnnnnnnnnnnnnnnnnnnnnnnnnnnnnnnnnnnnnnnnnnnnnnnnnnnnnnnnnnnnnnnnnnnnnnnnnnnnnnnnnnnnnnnnnnnnnnnnnnnnnnnnnnnnnnnnnnnnnnnnnnnnnnnnnnnnnnnnnnnnnnnnnnnnnnnnnnnnnnnnnnnnnnnnnnnnnnnnnnnnnnnnnnnnnnnnnnnnnnnnnnnnnnnnnnnnnnnnnnnnnnnnnnnnnnnnnnnnnnnnnnnnnnnnnnnnnnnnnnnnnnnnnnnnnnnnnnnnnnnnnnnnnnnnnnnnnnnnnnnnnnnnnnnnnnnnnnnnnnnnnnnnnnnnnnnnnnnnnnnnnnnnnnnnnnnnnnnnnnnnnnnnnnnnnnnnnnnnnnnnnnnnnnnnnnnnnnnnnnnnnnnnnnnnnnnnnnnnnnnnnnnnnnnnnnnnnnnnnnnnnnnnnnnnnnnnnnnnnnnnnnnnnnnnnnnnnnnnnnnnnnnnnnnnnnnnnnnnnnnnnnnnnnnnnnnnnnnnnnnnnnnnnnnnnnnnnnnnnnnnnnnnnnnnnnnnnnnnnnnnnnnnnnnnnnnnnnnnnnnnnnnnnnnnnnnnnnnnnnnnnnnnnnnnnnnnnnnnnnnnnnnnnnnnnnnnnnnnnnnnnnnnnnnnnnnnnnnnnnnnnnnnnnnnnnnnnnnnnnnnnnnnnnnnnnnnnnnnnnnnnnnnnnnnnnnnnnnnnnnnnnnnnnnnnnnnnnnnnnnnnnnnnnnnnnnnnnnnnnnnnnnnnnnnnnnnnnnnnnnnnnnnnnnnnnnnnnnnnnnnnnnnnnnnnnnnnnnnnnnnnnnnnnnnnnnnnnnnnnnnnnnnnnnnnnnnnnnnnnnnnnnnnnnnnnnnnnnnnnnnnnnnnnnnnnnnnnnnnnnnnnnnnnnnnnnnnnnnnnnnnnnnnnnnnnnnnnnnnnnnnnnnnnnnnnnnnnnnnnnnnnnnnnnnnnnnnnnnnnnnnnnnnnnnnnnnnnnnnnnnnnnnnnnnnnnnnnnnnnnnnnnnnnnnnnnnnnnnnnnnnnnnnnnnnnnnnnnnnnnnnnnnnnnnnnnnnnnnnnnnnnnnnnnnnnnnnnnnnnnnnnnnnnnnnnnnnnnnnnnnnnnnnnnnnnnnnnnnnnnnnnnnnnnnnnnnnnnnnnnnnnnnnnnnnnnnnnnnnnnnnnnnnnnnnnnnnnnnnnnnnnnnnnnnnnnnnnnnnnnnnnnnnnnnnnnnnnnnnnnnnnnnnnnnnnnnnnnnnnnnnnnnnnnnnnnnnnnnnnnnnnnnnnnnnnnnnnnnnnnnnnnnnnnnnnnnnnnnnnnnnnnnnnnnnnnnnnnnnnnnnnnnnnnnnnnnnnnnnnnnnnnnnnnnnnnnnnnnnnnnnnnnnnnnnnnnnnnnnnnnnnnnnnnnnnnnnnnnnnnnnnnnnnnnnnnnnnnnnnnnnnnnnnnnnnnnnnnnnnnnnnnnnnnnnnnnnnnnnnnnnnnnnnnnnnnnnnnnnnnnnnnnnnnnnnnnnnnnnnnnnnnnnnnnnnnnnnnnnnnnnnnnnnnnnnnnnnnnnnnnnnnnnnnnnnnnnnnnnnnnnnnnnnnnnnnnnnnnnnnnnnnnnnnnnnnnnnnnnnnnnnnnnnnnnnnnnnnnnnnnnnnnnnnnnnnnnnnnnnnnnnnnnnnnnnnnnnnnnnnnnnnnnnnnnnnnnnnnnnnnnnnnnnnnnnnnnnnnnnnnnnnnnnnnnnnnnnnnnnnnnnnnnnnnnnnnnnnnnnnnnnnnnnnnnnnnnnnnnnnnnnnnnnnnnnnnnnnnnnnnnnnnnnnnnnnnnnnnnnnnnnnnnnnnnnnnnnnnnnnnnnnnnnnnnnnnnnnnnnnnnnnnnnnnnnnnnnnnnnnnnnnnnnnnnnnnnnnnnnnnnnnnnnnnnnnnnnnnnnnnnnnnnnnnnnnnnnnnnnnnnnnnnnnnnnnnnnnnnnnnnnnnnnnnnnnnnnnnnnnnnnnnnnnnnnnnnnnnnnnnnnnnnnnnnnnnnnnnnnnnnnnnnnnnnnnnnnnnnnnnnnnnnnnnnnnnnnnnnnnnnnnnnnnnnnnnnnnnnnnnnnnnnnnnnnnnnnnnnnnnnnnnnnnnnnnnnnnnnnnnnnnnnnnnnnnnnnnnnnnnnnnnnnnnnnnnnnnnnnnnnnnnnnnnnnnnnnnnnnnnnnnnnnnnnnnnnnnnnnnnnnnnnnnnnnnnnnnnnnnnnnnnnnnnnnnnnnnnnnnnnnnnnnnnnnnnnnnnnnnnnnnnnnnnnnnnnnnnnnnnnnnnnnnnnnnnnnnnnnnnnnnnnnnnnnnnnnnnnnnnnnnnnnnnnnnnnnnnnnnnnnnnnnnnnnnnnnnnnnnnnnnnnnnnnnnnnnnnnnnnnnnnnnnnnnnnnnnnnnnnnnnnnnnnnnnnnnnnnnnnnnnnnnnnnnnnnnnnnnnnnnnnnnnnnnnnnnnnnnnnnnnnnnnnnnnnnnnnnnnnnnnnnnnnnnnnnnnnnnnnnnnnnnnnnnnnnnnnnnnnnnnnnnnnnnnnnnnnnnnnnnnnnnnnnnnnnnnnnnnnnnnnnnnnnnnnnnnnnnnnnnnnnnnnnnnnnnnnnnnnnnnnnnnnnnnnnnnnnnnnnnnnnnnnnnnnnnnnnnnnnnnnnnnnnnnnnnnnnnnnnnnnnnnnnnnnnnnnnnnnnnnnnnnnnnnnnnnnnnnnnnnnnnnnnnnnnnnnnnnnnnnnnnnnnnnnnnnnnnnnnnnnnnnnnnnnnnnnnnnnnnnnnnnnnnnnnnnnnnnnnnnnnnnnnnnnnnnnnnnnnnnnnnnnnnnnnnnnnnnnnnnnnnnnnnnnnnnnnnnnnnnnnnnnnnnnnnnnnnnnnnnnnnnnnnnnnnnnnnnnnnnnnnnnnnnnnnnnnnnnnnnnnnnnnnnnnnnnnnnnnnnnnnnnnnnnnnnnnnnnnnnnnnnnnnnnnnnnnnnnnnnnnnnnnnnnnnnnnnnnnnnnnnnnnnnnnnnnnnnnnnnnnnnnnnnnnnnnnnnnnnnnnnnnnnnnnnnnnnnnnnnnnnnnnnnnnnnnnnnnnnnnnnnnnnnnnnnnnnnnnnnnnnnnnnnnnnnnnnnnnnnnnnnnnnnnnnnnnnnnnnnnnnnnnnnnnnnnnnnnnnnnnnnnnnnnnnnnnnnnnnnnnnnnnnnnnnnnnnnnnnnnnnnnnnnnnnnnnnnnnnnnnnnnnnnnnnnnnnnnnnnnnnnnnnnnnnnnnnnnnnnnnnnnnnnnnnnnnnnnnnnnnnnnnnnnnnnnnnnnnnnnnnnnnnnnnnnnnnnnnnnnnnnnnnnnnnnnnnnnnnnnnnnnnnnnnnnnnnnnnnnnnnnnnnnnnnnnnnnnnnnnnnnnnnnnnnnnnnnnnnnnnnnnnnnnnnnnnnnnnnnnnnnnnnnnnnnnnnnnnnnnnnnnnnnnnnnnnnnnnnnnnnnnnnnnnnnnnnnnnnnnnnnnnnnnnnnnnnnnnnnnnnnnnnnnnnnnnnnnnnnnnnnnnnnnnnnnnnnnnnnnnnnnnnnnnnnnnnnnnnnnnnnnnnnnnnnnnnnnnnnnnnnnnnnnnnnnnnnnnnnnnnnnnnnnnnnnnnnnnnnnnnnnnnnnnnnnnnnnnnnnnnnnnnnnnnnnnnnnnnnnnnnnnnnnnnnnnnnnnnnnnnnnnnnnnnnnnnnnnnnnnnnnnnnnnnnnnnnnnnnnnnnnnnnnnnnnnnnnnnnnnnnnnnnnnnnnnnnnnnnnnnnnnnnnnnnnnnnnnnnnnnnnnnnnnnnnnnnnnnnnnnnnnnnnnnnnnnnnnnnnnnnnnnnnnnnnnnnnnnnnnnnnnnnnnnnnnnnnnnnnnnnnnnnnnnnnnnnnnnnnnnnnnnnnnnnnnnnnnnnnnnnnnnnnnnnnnnnnnnnnnnnnnnnnnnnnnnnnnnnnnnnnnnnnnnnnnnnnnnnnnnnnnnnnnnnnnnnnnnnnnnnnnnnnnnnnnnnnnnnnnnnnnnnnnnnnnnnnnnnnnnnnnnnnnnnnnnnnnnnnnnnnnnnnnnnnnnnnnnnnnnnnnnnnnnnnnnnnnnnnnnnnnnnnnnnnnnnnnnnnnnnnnnnnnnnnnnnnnnnnnnnnnnnnnnnnnnnnnnnnnnnnnnnnnnnnnnnnnnnnnnnnnnnnnnnnnnnnnnnnnnnnnnnnnnnnnnnnnnnnnnnnnnnnnnnnnnnnnnnnnnnnnnnnnnnnnnnnnnnnnnnnnnnnnnnnnnnnnnnnnnnnnnnnnnnnnnnnnnnnnnnnnnnnnnnnnnnnnnnnnnnnnnnnnnnnnnnnnnnnnnnnnnnnnnnnnnnnnnnnnnnnnnnnnnnnnnnnnnnnnnnnnnnnnnnnnnnnnnnnnnnnnnnnnnnnnnnnnnnnnnnnnnnnnnnnnnnnnnnnnnnnnnnnnnnnnnnnnnnnnnnnnnnnnnnnnnnnnnnnnnnnnnnnnnnnnnnnnnnnnnnnnnnnnnnnnnnnnnnnnnnnnnnnnnnnnnnnnnnnnnnnnnnnnnnnnnnnnnnnnnnnnnnnnnnnnnnnnnnnnnnnnnnnnnnnnnnnnnnnnnnnnnnnnnnnnnnnnnnnnnnnnnnnnnnnnnnnnnnnnnnnnnnnnnnnnnnnnnnnnnnnnnnnnnnnnnnnnnnnnnnnnnnnnnnnnnnnnnnnnnnnnnnnnnnnnnnnnnnnnnnnnnnnnnnnnnnnnnnnnnnnnnnnnnnnnnnnnnnnnnnnnnnnnnnnnnnnnnnnnnnnnnnnnnnnnnnnnnnnnnnnnnnnnnnnnnnnnnnnnnnnnnnnnnnnnnnnnnnnnnnnnnnnnnnnnnnnnnnnnnnnnnnnnnnnnnnnnnnnnnnnnnnnnnnnnnnnnnnnnnnnnnnnnnnnnnnnnnnnnnnnnnnnnnnnnnnnnnnnnnnnnnnnnnnnnnnnnnnnnnnnnnnnnnnnnnnnnnnnnnnnnnnnnnnnnnnnnnnnnnnnnnnnnnnnnnnnnnnnnnnnnnnnnnnnnnnnnnnnnnnnnnnnnnnnnnnnnnnnnnnnnnnnnnnnnnnnnnnnnnnnnnnnnnnnnnnnnnnnnnnnnnnnnnnnnnnnnnnnnnnnnnnnnnnnnnnnnnnnnnnnnnnnnnnnnnnnnnaaggaccgtgaacggaggctgagtcctcgtccgaccgtcaaaaaccccgtccggacggcccagggccaagcccgaccaccccactcacggattcggggtcgcctttttaagggatcgagccgcagcgcccgcggcgagcacgagagcagcaggaatctgaggaggtaccgtgtggacgccaaggtcatcgggttcaagctagaacgggagaccaagaacacggtgcggtacgaagaagagaccgcagggcaaccacctgcagtcggtacgctatatgtgcaaaagtgggcgctcggcactccggtcccagcgcgtttgaaactgacgctagaggtcgtaggataggccgctgtagacacgacgttgcaatagtgctttgttcgcccaagcgagagttcggtctcaatggtggaaacaaaggattccttcgtcttcctgatcgctacctgactcccaagattccctctcttttgactttagtgcttagttgcagaagaccgttccctgaggctctcgaagggaacggggcgtttccacgaggagctgaatgaacgctattatttgccacttagcactagttgatccgtttggaccgagctaggactacgcatcgatttcctcattcgatttgtcagctttcttgtttacgtaagcgggtacgctgttctctggaagtgcctttccaagggctgactggttggagacggaagcctcaacagctgtttgctcaatcttgtcaacctatggtataagaatgtgcgttctaatacctttgcatcgttaacacggattcactcccaggacggcggtgaccacagtggaaaaggctgctgggcttattgcggccaagtttcgacatagtgcggatggacaggacacttaccaccccctgctttgccacctgattgatgtggctgtggttgcggaggccctctgggaggagtgcttcgctaaacgtgcgcgggagcatctgacggagagtctccaactcgacagcatatccaccaaacagtgggtcgcatttttggccgggatccacgatctcggcaaggccactccagtcttccaggcgaagggcagccgggatcgacgttcgacaccgccatggcttgtgaacactcccctcgaattccggcctttatctttaggagataaggacccatggcacggcacggtgacggccgcctgcctcccagacatccttagtcgccagttggacgtttcccaagagagtgcagaccgcctcgccgtgatcgcaggaggccaccacggggttttcccttcggcaacgtcccgcaggaacgcgcgcattcccaccgctcggggtgagccccggcggggcgagcctaacccctggccgagcattcgggatgagctcgccactaccctcgccagtcttctcggccttgtcggtcttgagagttcgccgcagctgccctccaacgccgcgagcatgctgctggccggattcatctccgtcgcggactggatcggctccatcgatgacagcgcattcttcccatatgcgccggatggccccgacgatctccctgcgtacctggccgaccggaagctgcgggctcacgacgcgatcaggctcttgcactgggatgcctggcctcggcagagcaagctgcctcgtttcgaagaactctttcccaaaatgtcgccaaggcctcttcaggtggccacggagcaggtcgcgcccgaggtcgtggcacccggtctcgtaatccttgaagctcccatgggcgaggggaagactgaggcggccttctatcttgctgactactggaacgcctcgggtttccgaggttcgtacatagccatgccaacccaggcaaccagcaaccagctgcatcagcggttcgagcggttccttcgcggccggtacgggaccgaggaaaagatcaacatgcagcttctgcacggacacgccgctctgaacacggaaatcaagcttttggagaacggccatgccttcccagcgccatccggcattgatcccggcagcggcgagctggaagcgaccgtgggcgcaggggagtggttcacctaccgcaagcgaggcctgcttgctcccttcggtgtcggcaccgtcgatcaagcgctcctgtcggttctccaggtgaagcacgggtttgtgcgactcttcgggctggccggcaagacggtggtcgtggacgaggtccatgcctacgacgcgtacatgacgaccctcttggagcgcctcctggaatggctggcggcgctcggctcgccggtcgtactcctctccgcaacactgccaaccgtaaggaggcaggcgctcgtgaacgcgtatttgagcggtctcggccgcctgcccgtagcggagcttcctaacgaggcatatccgcggatcacctggacaggggtcgtgggcgtgagagtgcgcacggtcgaggctgctgtggagacccgacgacggctcggcctccgatggctgcccttcggtatcgagagtctaccggcacacttgctcggccagctcagggatggaggctgcgccgcggtcatctgcaacaccgtcaatcgcgcccaggaggtccactgcccttcgggacgcctatgccgccctcccggaagaggagcgtccaagccttgacctgttccatgcccgcttcctgttcaaagaccgcaaggaacgtgaggagcgctgcctgaagcgcttcggcaaacccgataaagatgacggacccaccgcagccagaccatggcgggctatcctggtggccacccaggtcatcgagcagagtctggacctggactttgacgtcatggtgagcgagatggcgccggttgacctcctcttgcagcggtcagggcgccttcagcgccaccaccgggcggatcggcgcgccaccagtgaacccgtgctccaggtcctgtcgcccacgctgggggacgacggcacccccgcgttcgagcgcgccaccacctacgtctatgatgagcacatcctcctccgcacctggcacgtcctccaggatcgggaggccatcgccgttcctgaggatatcgagggtttgatcgaggaggtgtaccgcgaatcgggcgaaccgccagacggcgcgccaggacacctcgccgcccgctggcacagcaccttcgccgagatgaagaggaagcggcaacgtgagcgtgacaaagcaatggtgccccgcattccgtcgccttcaacaggcgcaagattggaagactatacgcgcgacccgcgtgaagaggatgctgccgaccttcatcccgctctgcaggcgctgacgcgcctcgccgagccttcagtggaggttgtgttgctgcccgcgaactcccccttggatgcggcagcggacgctgttccctccctggcaacttgcagggaacttctccgtcactccgtctccatcactgccgctgatgttgtacatctattgctcgcacttcccgtgccccacccgtggaagcgctccggactgttacgccgcttgcggctgctctctctcgatgaaaacaacgagtgccgggtgggaaatgggatactgcggtatgacaccagcctcggtttgcaaatcatccgtctctaacgaaggaggtgcccatgtcagagtcgttctcgttcaacctcctcgatgaaccgtggataccgtgcctgaacaatgacgggaagctccgtcgaatcggcgtcagagaggcacttacgcaagcgggcacaatccggcaaatcgcggcaagcaatcccatggatcggctagcgatcctccggttcctgctggcattgctgtattggtgtaaggggaatccgccaacagaagcggagagtgcgcccgatgactcgtttcccacggaatggttcgcgaagctggaccagaacagggattgcttcaacctgctcggggagggaagaaggttttatcagtacaggggaaaacgcgaaatgccgctcacggcaaactatctggtccacgagatacccacgggcaccaatctctggcacttccgacacgccaccgatggagtggatggcctttgtcctgcctgctgcgctttgggcctgttgcggctgccgttgtttgcaacgtccggggggagcggcaagcctccaggcatcaacatgaaacccccactttatgtcatacctgtcggcgactcccttgcaaagacgctgcggctctcttggtgctccgcgccgagtctgggaacgccggcatgggagaagccggacatctcgttgccaaagactggcgaggtgccgttgttaacaggactatcgtggctgcccaggcgggtatggctcggcaatccagaggaatccgaagccacctgcatctcgtgtggtcgcaagaatcggttgataacatccagcgttttcgccggcatcggcagtatgaaaaccgatgatgaaactcccaaccgcctttggcgggacccccatgtcatctatgataacagcggcaagagcaaagtcacgaccctacacgctaggaacgccctgggcgccaccgatgcgggggctggccagtgggcgtcaatcgtagctgggatgttccaacagcaaagcgcccccgctgcaacggacttgcccaatcaggacagttgggccgagggtggcaaatacagcatatgggtcgtcggcttctccaccgtgcagaacgacaagtatctggaggctattgagtacacactgtctctccctgcctcagcaggtcaatctgtgaccgctgtgcaactcttggaacgatggcaagaagagaacgcacgccttgcccgcaaagtctggccgccagatgagcaatggtcttaccgcaagcatcccgagattgcgtcagccatcgccgccgttcgtccccatgtggaaggcaaggtctctgccaaagtgggggagctgcttaccggcggcgatgccgcatggctggaggccgccagcgagtatcgccccatgatggaggcagtcgccaggtctctctacccaggctttacgactgcggctgttgaatggcggaagcacattgctgacacgctgccggatatgaccaccacagggcctacaaaaaaggccgcaagaaagaaaggaggcgcgccatgagcccaacacccacggagcagtacattggcgttctggcaaagctgaagcctggcgacctggggctgctacgcagccatgccgggcaagggctggacaaatcggtgcatgggtttgacctgttcacgggcctttggtggccgctgcggcagagaaaccaagcagcgcctgaacgcgaggtgacctggctgatcgtgaagctttacgctcgctgtccgctcctccagtcgcctggcgataccctcgcccggcaactggcccgttgccagccaagcaaggagccagagcgtcagcgctaccggcagcgctttgaccggatgctcatgctgcccatcatcaagatggagcctgtgctgcaaggggcagtcgccatgatcgcctcaaaggatctcaagcttgattgggtgaaactcacggatgacctgtccatctgggaacgggaacgtacccggctcaggtgggcggaacaatttctggaaagcaacgaaaggacatagccatgctcattgaaatccacatcatccagaaccacagcccaaacaacctcaatcgggacgacctcggcgcgcccaagacctgctacttcggcggcgtcctgcgctcacgcatctccagccaggccatcaaacgcagcatccgcatgagcgatgagttcagcaagctacttggcggcgttcgcacgcgacagttggcgaagctgatcgcagagaacgtaactggcaaggcggatgtccagaatcgcgctgcacgaattctccaagcatgtggcatcgcaccgaaagatgagtcaagaagcgatatgctcgtttacacgactagggaggcggttgcccaaatggctgcgctgctacagaacgacgaaggcaagaccgatgcacagctacaaagtgatttcgggatgctcattagggaacgggtggctgtgccggacatggccctcagtggaagaatgctggaaaccggtgtcctgaaagacacaactgtagaagcggccctccaggtagcccacgccatttccacccatgaagcccgcccggaggtggactactacgtggcgaaggacgatgtcccaggagaggatgccggggcaggatatgtagacgaagcgatgttcgcttccgcctgcttctacaagtacttctctatccactgggaacaattggtcaagaacttgaaagcctatggggacaatcacaaagagcttgccgcccataccgtcggcgcgttcattcgcggggcggcgctggtcaatccctctggcaagcagaacagccatgcctcgcataataagcctgacggcatactgatcgagataagggacttccccattagctacgccaacgccttcgccaatccggtgtcgcacggcgagcgcgacgttatctcgcaaagcatcgcccagttgggccagtacgcccatgacctggataccggctacggcagaccgcagaagcgcttctggttctccccgaatggccgctacccgttaacggtgcgggacgataaggaggataaggacgtcgccgacaagaacctgacgtcattggaggacctggtacgcgctgtcaccgcagagatcggctacgactgggacgcggtccagagcattgccttgaatgggagatgagccgtatgagcgccaacaccctgtttctccggctggaaggccccatgcaagcctggggagaccaggaatccaagttcgtggtgcgacgaacagccgaggcccccaccaaatcgggagtgatcggtatgctgtgcgccgcgctgggcgtctcgcgccccgatgcctcctatgagtggcttccgaggttgagcgccctgcgcatgggagtccggaccgaccggccgggcgtccgctggtgggactaccacaccgtcggcgcggggatgcagatgcgcatcgccgaaggcaagaccaaagccggcgcgatgctgacgcggcgggagtacctctgcgacgccagctttctggtcgctctgcagggtgagccgacactggtcgcccgcctcgaggcggcgctgcgaaaaccccactggacaccctacttggggagaaaggcctgcccgccatcccgcccgctgttggagcgtcccgccgaggagtctggcgacctgctgactgcactttgctccgtcccgtggcgaaagcggctcgcaacagaccgtgtgccggcaaccgtggagtgtctgctcgactggcagtcgtcgctggaggagccagtagcacccgccgacgccctcgtctggtacgatgtgccgctcacttttgagcctcctgcacacgcccctagattcgtcatgcgccgccggttgcgcgtcggtatcggaggcgaggtcagcatagccgacaagcctgcccagaatcggacgctatcgcctccgcgaccccgcgcggactaccggaataccgagtatcgcaatgcccgcgctaagcgcctgaacgacgactatggcctctgcgtgttctgcaaaagtcccgccaccaccgtgcagcacatcacctaccgtcgggcgggaggcgacgaaacccaggacgacctccgctcactctgccggctttgtcatgacgcggtgacgatgatcgaatacggctatggcatgggcatggatcgcatcaaccctgaggagctacgctggcgggaagacattatccagaagcgtcaagagatcatccaattccgctcgctggagacccgacgacgtcgcctcagccctgaggaggtgtagtagccatgtacctatcgtgcctcttgatcaacgtcggagataacccggaccgcccgcgccccggtcggctgtggctccgcaacctctatcgagttcaccagcgcctgtgcatggcgtttccgactgcatccagggtgtccgctgatccggacttccttcagcctttcaacccggacgatttcgggccaaagccagtacatgccgctcggagcatggatgctggcttcctgttccgcattgaccctcaacccagtggccgagttgtgattcttgtgcagtctgcaagcatgcccgactgggactacgctttccataatgcggactatctcctggcggctccccccagcacgaaagcatttgaaccgtccgccacaaaggagcagcgtctccaattccgtcttgtggcgaatcccacaaagcgattgagccagaactcacgggaaaaggacggccaacccgtcaaatcggaatggattgggaaacgagtccccgttccaaccgaaaagctagaggagtggctagcgcagcgagctgcacctgccggattccgcgtagagaagctccttagcgtacaacctggttacgtccacgcctccaaggatggcggcggtgggggaaaccgacttcgctccgtccggtatgacggtatcctccaagtcaccgatcccgcacctttccaagataccctcatacgcggcattggtcccgcgaaggcttttggctgtggtctcctgtcagtcgccccgccagggaggtgaaccatgaaagacttgcacgcgttacccaagatacgggatagctggagctacttgtacgtggagcattgccgcatcgatcaggaggacaaggccattgccctgcacgatgcccagggcgtcaccgccgtcccctgcgcgagtctgtcgttactgatgctcgggccgggcaccagaatcacccatgccgccatccatgtcctggcggagaacggctgcatggtcttatggacgggggaagagggcgtgcgctgttatgccgtcggactgggcgaaacccggtcggcccggcgcctgctccatcaggcctacctctgtacccacccttccctgcggcttcaggtggcgcggcgactttatgagatgcggtttcccgatcccctggaccctggcctcagcttgcagcaaatacggggtaaagagggcatccgtgtccgggaggcatatgcccaggccagccgcgccaccgggatcccctggtccggacgggcctaccgacggggggactggagtgtcgccgaccctatgaaccgggcgctctccgcagccaatagctgtctctacggaatttgtcatgccgccatcgtctctgccgggtactccccagccctgggtttcgtccatacgggcaagatgctctccttcgtttacgacatcgccgatctctacaaggtcgacttcagcatcccgattgcctttggggctgccgaagaagggtttcatcaactggagacgcgggtgcggcaggcaagcagggatgccttccacaaacagcggctcttggcccgtataatccccgatattgatcgcgccctcggcgtgaagcctaccgagcaggatgaggacagcgcctacgacgcagacgacgccctccccggcggcctgtgggacccggaagtgggatcggtaccggggggaacaagtcatgcgagcctagcgaggtgaaatgatgctggtgctaagacttgagcgggttcctgcatcgttgcggggtgaactgacacggtggctgctggaggcctccaccgggatgtttgtgggcagggtgtctgccatggtgcgcgaacagctatggacgctggtgtgccgcagcctgaagggaggtggagcggtacttgcctatagcacggacaatgagcaggggttcgcgctgcggacatggggcactccgtcgcgggaggtggtagacttcgaggggctttcgctggtgcgggtgccgcgttctgtgcctgaggagtagtgtttttctatgtattttccagtgttgtccccacacgcgtgggggtgaaccgtcatcgtgactgttgctaatttgaacttctacgttgtccccacacgcgtgggggtgaaccgatatagtgctaatgagcaagtctcaggtttaagttgtccccacacgcgtgggggtgaaccgtgggcccagcgcgtcaccgaggctgccaaccagttgtccccacacgcgtgggggtgaaccggtaagctggtcggtcaggtcgctggcgaagccgttgtccccacacgcgtgggggtgaaccgggggcacggcatgacgtgcaaacactgcgaccgttgtccccacacgcgtgggggtgaaccgggggcacggcatgacgtgcaaacactgcgaccgttgtccccacacgcgtgggggtgaaccggagtacgctgcgcagcacgggtggacgccgcagttgtccccacacgcgtgggggtgaaccgggcacgacggtcaacgtagacgcaagatcggcgttgtccccacacgcgtgggggtgaaccgagaggaagtccttcttccgccgattggctgaggttgtccccacacgcgtgggggtgaaccggttggcccctgtaagatcggccctcaaccccggttgtccccacacgcgtgggggtgaaccggacctacaaacggaagcggtgcgaaacatcatgttgtccccacacgcgtgggggtgaggtaaaatggaggagagtcgaccattcactatccccacatagtgtcggagcaactcactcaccagcgctctccccaaccggtgacgaagcgttcgattgcttgtgagtactgcctcctcagggacaaggcggacgcccctcctcgggccagccattgatgactccatccacgacgacgccgctaacagatggacgatccatggtgcaatcggacagactcttaccattagatagtaagattctatagccggtgacgctgcaaacgccagaagggaatggtaaactttgacgcttcccagttgtttgtcgtacttgcgtacatgtatcagatgccatcggtgcaagcgtccgctgctgctcggtagttgggctgcacctgacgttccctggaaccgtcttgtaggtgagtgtgccccgttctggtgcctgaccaaaggcaagttcccgctttaagagttcacacgggtcgttgatccagttgttcgacgggctgttgtatgccggtcgataccggatcgttgcgcccaaaaccttgcgggctacgttatcgccatagaatactgccactgtctggttggcatccgccaacgtgacggtgtactcccaattggagagcatggga

SEQ ID NO: 1030 - DNA, 106411 bp, Artificial Sequence
  Synthetic Oligonucleotide
  misc_feature (1)..(95360): n is a, c, g, or t
nnnnnnnnnnnnnnnnnnnnnnnnnnnnnnnnnnnnnnnnnnnnnnnnnnnnnnnnnnnnnnnnnnnnnnnnnnnnnnnnnnnnnnnnnnnnnnnnnnnnnnnnnnnnnnnnnnnnnnnnnnnnnnnnnnnnnnnnnnnnnnnnnnnnnnnnnnnnnnnnnnnnnnnnnnnnnnnnnnnnnnnnnnnnnnnnnnnnnnnnnnnnnnnnnnnnnnnnnnnnnnnnnnnnnnnnnnnnnnnnnnnnnnnnnnnnnnnnnnnnnnnnnnnnnnnnnnnnnnnnnnnnnnnnnnnnnnnnnnnnnnnnnnnnnnnnnnnnnnnnnnnnnnnnnnnnnnnnnnnnnnnnnnnnnnnnnnnnnnnnnnnnnnnnnnnnnnnnnnnnnnnnnnnnnnnnnnnnnnnnnnnnnnnnnnnnnnnnnnnnnnnnnnnnnnnnnnnnnnnnnnnnnnnnnnnnnnnnnnnnnnnnnnnnnnnnnnnnnnnnnnnnnnnnnnnnnnnnnnnnnnnnnnnnnnnnnnnnnnnnnnnnnnnnnnnnnnnnnnnnnnnnnnnnnnnnnnnnnnnnnnnnnnnnnnnnnnnnnnnnnnnnnnnnnnnnnnnnnnnnnnnnnnnnnnnnnnnnnnnnnnnnnnnnnnnnnnnnnnnnnnnnnnnnnnnnnnnnnnnnnnnnnnnnnnnnnnnnnnnnnnnnnnnnnnnnnnnnnnnnnnnnnnnnnnnnnnnnnnnnnnnnnnnnnnnnnnnnnnnnnnnnnnnnnnnnnnnnnnnnnnnnnnnnnnnnnnnnnnnnnnnnnnnnnnnnnnnnnnnnnnnnnnnnnnnnnnnnnnnnnnnnnnnnnnnnnnnnnnnnnnnnnnnnnnnnnnnnnnnnnnnnnnnnnnnnnnnnnnnnnnnnnnnnnnnnnnnnnnnnnnnnnnnnnnnnnnnnnnnnnnnnnnnnnnnnnnnnnnnnnnnnnnnnnnnnnnnnnnnnnnnnnnnnnnnnnnnnnnnnnnnnnnnnnnnnnnnnnnnnnnnnnnnnnnnnnnnnnnnnnnnnnnnnnnnnnnnnnnnnnnnnnnnnnnnnnnnnnnnnnnnnnnnnnnnnnnnnnnnnnnnnnnnnnnnnnnnnnnnnnnnnnnnnnnnnnnnnnnnnnnnnnnnnnnnnnnnnnnnnnnnnnnnnnnnnnnnnnnnnnnnnnnnnnnnnnnnnnnnnnnnnnnnnnnnnnnnnnnnnnnnnnnnnnnnnnnnnnnnnnnnnnnnnnnnnnnnnnnnnnnnnnnnnnnnnnnnnnnnnnnnnnnnnnnnnnnnnnnnnnnnnnnnnnnnnnnnnnnnnnnnnnnnnnnnnnnnnnnnnnnnnnnnnnnnnnnnnnnnnnnnnnnnnnnnnnnnnnnnnnnnnnnnnnnnnnnnnnnnnnnnnnnnnnnnnnnnnnnnnnnnnnnnnnnnnnnnnnnnnnnnnnnnnnnnnnnnnnnnnnnnnnnnnnnnnnnnnnnnnnnnnnnnnnnnnnnnnnnnnnnnnnnnnnnnnnnnnnnnnnnnnnnnnnnnnnnnnnnnnnnnnnnnnnnnnnnnnnnnnnnnnnnnnnnnnnnnnnnnnnnnnnnnnnnnnnnnnnnnnnnnnnnnnnnnnnnnnnnnnnnnnnnnnnnnnnnnnnnnnnnnnnnnnnnnnnnnnnnnnnnnnnnnnnnnnnnnnnnnnnnnnnnnnnnnnnnnnnnnnnnnnnnnnnnnnnnnnnnnnnnnnnnnnnnnnnnnnnnnnnnnnnnnnnnnnnnnnnnnnnnnnnnnnnnnnnnnnnnnnnnnnnnnnnnnnnnnnnnnnnnnnnnnnnnnnnnnnnnnnnnnnnnnnnnnnnnnnnnnnnnnnnnnnnnnnnnnnnnnnnnnnnnnnnnnnnnnnnnnnnnnnnnnnnnnnnnnnnnnnnnnnnnnnnnnnnnnnnnnnnnnnnnnnnnnnnnnnnnnnnnnnnnnnnnnnnnnnnnnnnnnnnnnnnnnnnnnnnnnnnnnnnnnnnnnnnnnnnnnnnnnnnnnnnnnnnnnnnnnnnnnnnnnnnnnnnnnnnnnnnnnnnnnnnnnnnnnnnnnnnnnnnnnnnnnnnnnnnnnnnnnnnnnnnnnnnnnnnnnnnnnnnnnnnnnnnnnnnnnnnnnnnnnnnnnnnnnnnnnnnnnnnnnnnnnnnnnnnnnnnnnnnnnnnnnnnnnnnnnnnnnnnnnnnnnnnnnnnnnnnnnnnnnnnnnnnnnnnnnnnnnnnnnnnnnnnnnnnnnnnnnnnnnnnnnnnnnnnnnnnnnnnnnnnnnnnnnnnnnnnnnnnnnnnnnnnnnnnnnnnnnnnnnnnnnnnnnnnnnnnnnnnnnnnnnnnnnnnnnnnnnnnnnnnnnnnnnnnnnnnnnnnnnnnnnnnnnnnnnnnnnnnnnnnnnnnnnnnnnnnnnnnnnnnnnnnnnnnnnnnnnnnnnnnnnnnnnnnnnnnnnnnnnnnnnnnnnnnnnnnnnnnnnnnnnnnnnnnnnnnnnnnnnnnnnnnnnnnnnnnnnnnnnnnnnnnnnnnnnnnnnnnnnnnnnnnnnnnnnnnnnnnnnnnnnnnnnnnnnnnnnnnnnnnnnnnnnnnnnnnnnnnnnnnnnnnnnnnnnnnnnnnnnnnnnnnnnnnnnnnnnnnnnnnnnnnnnnnnnnnnnnnnnnnnnnnnnnnnnnnnnnnnnnnnnnnnnnnnnnnnnnnnnnnnnnnnnnnnnnnnnnnnnnnnnnnnnnnnnnnnnnnnnnnnnnnnnnnnnnnnnnnnnnnnnnnnnnnnnnnnnnnnnnnnnnnnnnnnnnnnnnnnnnnnnnnnnnnnnnnnnnnnnnnnnnnnnnnnnnnnnnnnnnnnnnnnnnnnnnnnnnnnnnnnnnnnnnnnnnnnnnnnnnnnnnnnnnnnnnnnnnnnnnnnnnnnnnnnnnnnnnnnnnnnnnnnnnnnnnnnnnnnnnnnnnnnnnnnnnnnnnnnnnnnnnnnnnnnnnnnnnnnnnnnnnnnnnnnnnnnnnnnnnnnnnnnnnnnnnnnnnnnnnnnnnnnnnnnnnnnnnnnnnnnnnnnnnnnnnnnnnnnnnnnnnnnnnnnnnnnnnnnnnnnnnnnnnnnnnnnnnnnnnnnnnnnnnnnnnnnnnnnnnnnnnnnnnnnnnnnnnnnnnnnnnnnnnnnnnnnnnnnnnnnnnnnnnnnnnnnnnnnnnnnnnnnnnnnnnnnnnnnnnnnnnnnnnnnnnnnnnnnnnnnnnnnnnnnnnnnnnnnnnnnnnnnnnnnnnnnnnnnnnnnnnnnnnnnnnnnnnnnnnnnnnnnnnnnnnnnnnnnnnnnnnnnnnnnnnnnnnnnnnnnnnnnnnnnnnnnnnnnnnnnnnnnnnnnnnnnnnnnnnnnnnnnnnnnnnnnnnnnnnnnnnnnnnnnnnnnnnnnnnnnnnnnnnnnnnnnnnnnnnnnnnnnnnnnnnnnnnnnnnnnnnnnnnnnnnnnnnnnnnnnnnnnnnnnnnnnnnnnnnnnnnnnnnnnnnnnnnnnnnnnnnnnnnnnnnnnnnnnnnnnnnnnnnnnnnnnnnnnnnnnnnnnnnnnnnnnnnnnnnnnnnnnnnnnnnnnnnnnnnnnnnnnnnnnnnnnnnnnnnnnnnnnnnnnnnnnnnnnnnnnnnnnnnnnnnnnnnnnnnnnnnnnnnnnnnnnnnnnnnnnnnnnnnnnnnnnnnnnnnnnnnnnnnnnnnnnnnnnnnnnnnnnnnnnnnnnnnnnnnnnnnnnnnnnnnnnnnnnnnnnnnnnnnnnnnnnnnnnnnnnnnnnnnnnnnnnnnnnnnnnnnnnnnnnnnnnnnnnnnnnnnnnnnnnnnnnnnnnnnnnnnnnnnnnnnnnnnnnnnnnnnnnnnnnnnnnnnnnnnnnnnnnnnnnnnnnnnnnnnnnnnnnnnnnnnnnnnnnnnnnnnnnnnnnnnnnnnnnnnnnnnnnnnnnnnnnnnnnnnnnnnnnnnnnnnnnnnnnnnnnnnnnnnnnnnnnnnnnnnnnnnnnnnnnnnnnnnnnnnnnnnnnnnnnnnnnnnnnnnnnnnnnnnnnnnnnnnnnnnnnnnnnnnnnnnnnnnnnnnnnnnnnnnnnnnnnnnnnnnnnnnnnnnnnnnnnnnnnnnnnnnnnnnnnnnnnnnnnnnnnnnnnnnnnnnnnnnnnnnnnnnnnnnnnnnnnnnnnnnnnnnnnnnnnnnnnnnnnnnnnnnnnnnnnnnnnnnnnnnnnnnnnnnnnnnnnnnnnnnnnnnnnnnnnnnnnnnnnnnnnnnnnnnnnnnnnnnnnnnnnnnnnnnnnnnnnnnnnnnnnnnnnnnnnnnnnnnnnnnnnnnnnnnnnnnnnnnnnnnnnnnnnnnnnnnnnnnnnnnnnnnnnnnnnnnnnnnnnnnnnnnnnnnnnnnnnnnnnnnnnnnnnnnnnnnnnnnnnnnnnnnnnnnnnnnnnnnnnnnnnnnnnnnnnnnnnnnnnnnnnnnnnnnnnnnnnnnnnnnnnnnnnnnnnnnnnnnnnnnnnnnnnnnnnnnnnnnnnnnnnnnnnnnnnnnnnnnnnnnnnnnnnnnnnnnnnnnnnnnnnnnnnnnnnnnnnnnnnnnnnnnnnnnnnnnnnnnnnnnnnnnnnnnnnnnnnnnnnnnnnnnnnnnnnnnnnnnnnnnnnnnnnnnnnnnnnnnnnnnnnnnnnnnnnnnnnnnnnnnnnnnnnnnnnnnnnnnnnnnnnnnnnnnnnnnnnnnnnnnnnnnnnnnnnnnnnnnnnnnnnnnnnnnnnnnnnnnnnnnnnnnnnnnnnnnnnnnnnnnnnnnnnnnnnnnnnnnnnnnnnnnnnnnnnnnnnnnnnnnnnnnnnnnnnnnnnnnnnnnnnnnnnnnnnnnnnnnnnnnnnnnnnnnnnnnnnnnnnnnnnnnnnnnnnnnnnnnnnnnnnnnnnnnnnnnnnnnnnnnnnnnnnnnnnnnnnnnnnnnnnnnnnnnnnnnnnnnnnnnnnnnnnnnnnnnnnnnnnnnnnnnnnnnnnnnnnnnnnnnnnnnnnnnnnnnnnnnnnnnnnnnnnnnnnnnnnnnnnnnnnnnnnnnnnnnnnnnnnnnnnnnnnnnnnnnnnnnnnnnnnnnnnnnnnnnnnnnnnnnnnnnnnnnnnnnnnnnnnnnnnnnnnnnnnnnnnnnnnnnnnnnnnnnnnnnnnnnnnnnnnnnnnnnnnnnnnnnnnnnnnnnnnnnnnnnnnnnnnnnnnnnnnnnnnnnnnnnnnnnnnnnnnnnnnnnnnnnnnnnnnnnnnnnnnnnnnnnnnnnnnnnnnnnnnnnnnnnnnnnnnnnnnnnnnnnnnnnnnnnnnnnnnnnnnnnnnnnnnnnnnnnnnnnnnnnnnnnnnnnnnnnnnnnnnnnnnnnnnnnnnnnnnnnnnnnnnnnnnnnnnnnnnnnnnnnnnnnnnnnnnnnnnnnnnnnnnnnnnnnnnnnnnnnnnnnnnnnnnnnnnnnnnnnnnnnnnnnnnnnnnnnnnnnnnnnnnnnnnnnnnnnnnnnnnnnnnnnnnnnnnnnnnnnnnnnnnnnnnnnnnnnnnnnnnnnnnnnnnnnnnnnnnnnnnnnnnnnnnnnnnnnnnnnnnnnnnnnnnnnnnnnnnnnnnnnnnnnnnnnnnnnnnnnnnnnnnnnnnnnnnnnnnnnnnnnnnnnnnnnnnnnnnnnnnnnnnnnnnnnnnnnnnnnnnnnnnnnnnnnnnnnnnnnnnnnnnnnnnnnnnnnnnnnnnnnnnnnnnnnnnnnnnnnnnnnnnnnnnnnnnnnnnnnnnnnnnnnnnnnnnnnnnnnnnnnnnnnnnnnnnnnnnnnnnnnnnnnnnnnnnnnnnnnnnnnnnnnnnnnnnnnnnnnnnnnnnnnnnnnnnnnnnnnnnnnnnnnnnnnnnnnnnnnnnnnnnnnnnnnnnnnnnnnnnnnnnnnnnnnnnnnnnnnnnnnnnnnnnnnnnnnnnnnnnnnnnnnnnnnnnnnnnnnnnnnnnnnnnnnnnnnnnnnnnnnnnnnnnnnnnnnnnnnnnnnnnnnnnnnnnnnnnnnnnnnnnnnnnnnnnnnnnnnnnnnnnnnnnnnnnnnnnnnnnnnnnnnnnnnnnnnnnnnnnnnnnnnnnnnnnnnnnnnnnnnnnnnnnnnnnnnnnnnnnnnnnnnnnnnnnnnnnnnnnnnnnnnnnnnnnnnnnnnnnnnnnnnnnnnnnnnnnnnnnnnnnnnnnnnnnnnnnnnnnnnnnnnnnnnnnnnnnnnnnnnnnnnnnnnnnnnnnnnnnnnnnnnnnnnnnnnnnnnnnnnnnnnnnnnnnnnnnnnnnnnnnnnnnnnnnnnnnnnnnnnnnnnnnnnnnnnnnnnnnnnnnnnnnnnnnnnnnnnnnnnnnnnnnnnnnnnnnnnnnnnnnnnnnnnnnnnnnnnnnnnnnnnnnnnnnnnnnnnnnnnnnnnnnnnnnnnnnnnnnnnnnnnnnnnnnnnnnnnnnnnnnnnnnnnnnnnnnnnnnnnnnnnnnnnnnnnnnnnnnnnnnnnnnnnnnnnnnnnnnnnnnnnnnnnnnnnnnnnnnnnnnnnnnnnnnnnnnnnnnnnnnnnnnnnnnnnnnnnnnnnnnnnnnnnnnnnnnnnnnnnnnnnnnnnnnnnnnnnnnnnnnnnnnnnnnnnnnnnnnnnnnnnnnnnnnnnnnnnnnnnnnnnnnnnnnnnnnnnnnnnnnnnnnnnnnnnnnnnnnnnnnnnnnnnnnnnnnnnnnnnnnnnnnnnnnnnnnnnnnnnnnnnnnnnnnnnnnnnnnnnnnnnnnnnnnnnnnnnnnnnnnnnnnnnnnnnnnnnnnnnnnnnnnnnnnnnnnnnnnnnnnnnnnnnnnnnnnnnnnnnnnnnnnnnnnnnnnnnnnnnnnnnnnnnnnnnnnnnnnnnnnnnnnnnnnnnnnnnnnnnnnnnnnnnnnnnnnnnnnnnnnnnnnnnnnnnnnnnnnnnnnnnnnnnnnnnnnnnnnnnnnnnnnnnnnnnnnnnnnnnnnnnnnnnnnnnnnnnnnnnnnnnnnnnnnnnnnnnnnnnnnnnnnnnnnnnnnnnnnnnnnnnnnnnnnnnnnnnnnnnnnnnnnnnnnnnnnnnnnnnnnnnnnnnnnnnnnnnnnnnnnnnnnnnnnnnnnnnnnnnnnnnnnnnnnnnnnnnnnnnnnnnnnnnnnnnnnnnnnnnnnnnnnnnnnnnnnnnnnnnnnnnnnnnnnnnnnnnnnnnnnnnnnnnnnnnnnnnnnnnnnnnnnnnnnnnnnnnnnnnnnnnnnnnnnnnnnnnnnnnnnnnnnnnnnnnnnnnnnnnnnnnnnnnnnnnnnnnnnnnnnnnnnnnnnnnnnnnnnnnnnnnnnnnnnnnnnnnnnnnnnnnnnnnnnnnnnnnnnnnnnnnnnnnnnnnnnnnnnnnnnnnnnnnnnnnnnnnnnnnnnnnnnnnnnnnnnnnnnnnnnnnnnnnnnnnnnnnnnnnnnnnnnnnnnnnnnnnnnnnnnnnnnnnnnnnnnnnnnnnnnnnnnnnnnnnnnnnnnnnnnnnnnnnnnnnnnnnnnnnnnnnnnnnnnnnnnnnnnnnnnnnnnnnnnnnnnnnnnnnnnnnnnnnnnnnnnnnnnnnnnnnnnnnnnnnnnnnnnnnnnnnnnnnnnnnnnnnnnnnnnnnnnnnnnnnnnnnnnnnnnnnnnnnnnnnnnnnnnnnnnnnnnnnnnnnnnnnnnnnnnnnnnnnnnnnnnnnnnnnnnnnnnnnnnnnnnnnnnnnnnnnnnnnnnnnnnnnnnnnnnnnnnnnnnnnnnnnnnnnnnnnnnnnnnnnnnnnnnnnnnnnnnnnnnnnnnnnnnnnnnnnnnnnnnnnnnnnnnnnnnnnnnnnnnnnnnnnnnnnnnnnnnnnnnnnnnnnnnnnnnnnnnnnnnnnnnnnnnnnnnnnnnnnnnnnnnnnnnnnnnnnnnnnnnnnnnnnnnnnnnnnnnnnnnnnnnnnnnnnnnnnnnnnnnnnnnnnnnnnnnnnnnnnnnnnnnnnnnnnnnnnnnnnnnnnnnnnnnnnnnnnnnnnnnnnnnnnnnnnnnnnnnnnnnnnnnnnnnnnnnnnnnnnnnnnnnnnnnnnnnnnnnnnnnnnnnnnnnnnnnnnnnnnnnnnnnnnnnnnnnnnnnnnnnnnnnnnnnnnnnnnnnnnnnnnnnnnnnnnnnnnnnnnnnnnnnnnnnnnnnnnnnnnnnnnnnnnnnnnnnnnnnnnnnnnnnnnnnnnnnnnnnnnnnnnnnnnnnnnnnnnnnnnnnnnnnnnnnnnnnnnnnnnnnnnnnnnnnnnnnnnnnnnnnnnnnnnnnnnnnnnnnnnnnnnnnnnnnnnnnnnnnnnnnnnnnnnnnnnnnnnnnnnnnnnnnnnnnnnnnnnnnnnnnnnnnnnnnnnnnnnnnnnnnnnnnnnnnnnnnnnnnnnnnnnnnnnnnnnnnnnnnnnnnnnnnnnnnnnnnnnnnnnnnnnnnnnnnnnnnnnnnnnnnnnnnnnnnnnnnnnnnnnnnnnnnnnnnnnnnnnnnnnnnnnnnnnnnnnnnnnnnnnnnnnnnnnnnnnnnnnnnnnnnnnnnnnnnnnnnnnnnnnnnnnnnnnnnnnnnnnnnnnnnnnnnnnnnnnnnnnnnnnnnnnnnnnnnnnnnnnnnnnnnnnnnnnnnnnnnnnnnnnnnnnnnnnnnnnnnnnnnnnnnnnnnnnnnnnnnnnnnnnnnnnnnnnnnnnnnnnnnnnnnnnnnnnnnnnnnnnnnnnnnnnnnnnnnnnnnnnnnnnnnnnnnnnnnnnnnnnnnnnnnnnnnnnnnnnnnnnnnnnnnnnnnnnnnnnnnnnnnnnnnnnnnnnnnnnnnnnnnnnnnnnnnnnnnnnnnnnnnnnnnnnnnnnnnnnnnnnnnnnnnnnnnnnnnnnnnnnnnnnnnnnnnnnnnnnnnnnnnnnnnnnnnnnnnnnnnnnnnnnnnnnnnnnnnnnnnnnnnnnnnnnnnnnnnnnnnnnnnnnnnnnnnnnnnnnnnnnnnnnnnnnnnnnnnnnnnnnnnnnnnnnnnnnnnnnnnnnnnnnnnnnnnnnnnnnnnnnnnnnnnnnnnnnnnnnnnnnnnnnnnnnnnnnnnnnnnnnnnnnnnnnnnnnnnnnnnnnnnnnnnnnnnnnnnnnnnnnnnnnnnnnnnnnnnnnnnnnnnnnnnnnnnnnnnnnnnnnnnnnnnnnnnnnnnnnnnnnnnnnnnnnnnnnnnnnnnnnnnnnnnnnnnnnnnnnnnnnnnnnnnnnnnnnnnnnnnnnnnnnnnnnnnnnnnnnnnnnnnnnnnnnnnnnnnnnnnnnnnnnnnnnnnnnnnnnnnnnnnnnnnnnnnnnnnnnnnnnnnnnnnnnnnnnnnnnnnnnnnnnnnnnnnnnnnnnnnnnnnnnnnnnnnnnnnnnnnnnnnnnnnnnnnnnnnnnnnnnnnnnnnnnnnnnnnnnnnnnnnnnnnnnnnnnnnnnnnnnnnnnnnnnnnnnnnnnnnnnnnnnnnnnnnnnnnnnnnnnnnnnnnnnnnnnnnnnnnnnnnnnnnnnnnnnnnnnnnnnnnnnnnnnnnnnnnnnnnnnnnnnnnnnnnnnnnnnnnnnnnnnnnnnnnnnnnnnnnnnnnnnnnnnnnnnnnnnnnnnnnnnnnnnnnnnnnnnnnnnnnnnnnnnnnnnnnnnnnnnnnnnnnnnnnnnnnnnnnnnnnnnnnnnnnnnnnnnnnnnnnnnnnnnnnnnnnnnnnnnnnnnnnnnnnnnnnnnnnnnnnnnnnnnnnnnnnnnnnnnnnnnnnnnnnnnnnnnnnnnnnnnnnnnnnnnnnnnnnnnnnnnnnnnnnnnnnnnnnnnnnnnnnnnnnnnnnnnnnnnnnnnnnnnnnnnnnnnnnnnnnnnnnnnnnnnnnnnnnnnnnnnnnnnnnnnnnnnnnnnnnnnnnnnnnnnnnnnnnnnnnnnnnnnnnnnnnnnnnnnnnnnnnnnnnnnnnnnnnnnnnnnnnnnnnnnnnnnnnnnnnnnnnnnnnnnnnnnnnnnnnnnnnnnnnnnnnnnnnnnnnnnnnnnnnnnnnnnnnnnnnnnnnnnnnnnnnnnnnnnnnnnnnnnnnnnnnnnnnnnnnnnnnnnnnnnnnnnnnnnnnnnnnnnnnnnnnnnnnnnnnnnnnnnnnnnnnnnnnnnnnnnnnnnnnnnnnnnnnnnnnnnnnnnnnnnnnnnnnnnnnnnnnnnnnnnnnnnnnnnnnnnnnnnnnnnnnnnnnnnnnnnnnnnnnnnnnnnnnnnnnnnnnnnnnnnnnnnnnnnnnnnnnnnnnnnnnnnnnnnnnnnnnnnnnnnnnnnnnnnnnnnnnnnnnnnnnnnnnnnnnnnnnnnnnnnnnnnnnnnnnnnnnnnnnnnnnnnnnnnnnnnnnnnnnnnnnnnnnnnnnnnnnnnnnnnnnnnnnnnnnnnnnnnnnnnnnnnnnnnnnnnnnnnnnnnnnnnnnnnnnnnnnnnnnnnnnnnnnnnnnnnnnnnnnnnnnnnnnnnnnnnnnnnnnnnnnnnnnnnnnnnnnnnnnnnnnnnnnnnnnnnnnnnnnnnnnnnnnnnnnnnnnnnnnnnnnnnnnnnnnnnnnnnnnnnnnnnnnnnnnnnnnnnnnnnnnnnnnnnnnnnnnnnnnnnnnnnnnnnnnnnnnnnnnnnnnnnnnnnnnnnnnnnnnnnnnnnnnnnnnnnnnnnnnnnnnnnnnnnnnnnnnnnnnnnnnnnnnnnnnnnnnnnnnnnnnnnnnnnnnnnnnnnnnnnnnnnnnnnnnnnnnnnnnnnnnnnnnnnnnnnnnnnnnnnnnnnnnnnnnnnnnnnnnnnnnnnnnnnnnnnnnnnnnnnnnnnnnnnnnnnnnnnnnnnnnnnnnnnnnnnnnnnnnnnnnnnnnnnnnnnnnnnnnnnnnnnnnnnnnnnnnnnnnnnnnnnnnnnnnnnnnnnnnnnnnnnnnnnnnnnnnnnnnnnnnnnnnnnnnnnnnnnnnnnnnnnnnnnnnnnnnnnnnnnnnnnnnnnnnnnnnnnnnnnnnnnnnnnnnnnnnnnnnnnnnnnnnnnnnnnnnnnnnnnnnnnnnnnnnnnnnnnnnnnnnnnnnnnnnnnnnnnnnnnnnnnnnnnnnnnnnnnnnnnnnnnnnnnnnnnnnnnnnnnnnnnnnnnnnnnnnnnnnnnnnnnnnnnnnnnnnnnnnnnnnnnnnnnnnnnnnnnnnnnnnnnnnnnnnnnnnnnnnnnnnnnnnnnnnnnnnnnnnnnnnnnnnnnnnnnnnnnnnnnnnnnnnnnnnnnnnnnnnnnnnnnnnnnnnnnnnnnnnnnnnnnnnnnnnnnnnnnnnnnnnnnnnnnnnnnnnnnnnnnnnnnnnnnnnnnnnnnnnnnnnnnnnnnnnnnnnnnnnnnnnnnnnnnnnnnnnnnnnnnnnnnnnnnnnnnnnnnnnnnnnnnnnnnnnnnnnnnnnnnnnnnnnnnnnnnnnnnnnnnnnnnnnnnnnnnnnnnnnnnnnnnnnnnnnnnnnnnnnnnnnnnnnnnnnnnnnnnnnnnnnnnnnnnnnnnnnnnnnnnnnnnnnnnnnnnnnnnnnnnnnnnnnnnnnnnnnnnnnnnnnnnnnnnnnnnnnnnnnnnnnnnnnnnnnnnnnnnnnnnnnnnnnnnnnnnnnnnnnnnnnnnnnnnnnnnnnnnnnnnnnnnnnnnnnnnnnnnnnnnnnnnnnnnnnnnnnnnnnnnnnnnnnnnnnnnnnnnnnnnnnnnnnnnnnnnnnnnnnnnnnnnnnnnnnnnnnnnnnnnnnnnnnnnnnnnnnnnnnnnnnnnnnnnnnnnnnnnnnnnnnnnnnnnnnnnnnnnnnnnnnnnnnnnnnnnnnnnnnnnnnnnnnnnnnnnnnnnnnnnnnnnnnnnnnnnnnnnnnnnnnnnnnnnnnnnnnnnnnnnnnnnnnnnnnnnnnnnnnnnnnnnnnnnnnnnnnnnnnnnnnnnnnnnnnnnnnnnnnnnnnnnnnnnnnnnnnnnnnnnnnnnnnnnnnnnnnnnnnnnnnnnnnnnnnnnnnnnnnnnnnnnnnnnnnnnnnnnnnnnnnnnnnnnnnnnnnnnnnnnnnnnnnnnnnnnnnnnnnnnnnnnnnnnnnnnnnnnnnnnnnnnnnnnnnnnnnnnnnnnnnnnnnnnnnnnnnnnnnnnnnnnnnnnnnnnnnnnnnnnnnnnnnnnnnnnnnnnnnnnnnnnnnnnnnnnnnnnnnnnnnnnnnnnnnnnnnnnnnnnnnnnnnnnnnnnnnnnnnnnnnnnnnnnnnnnnnnnnnnnnnnnnnnnnnnnnnnnnnnnnnnnnnnnnnnnnnnnnnnnnnnnnnnnnnnnnnnnnnnnnnnnnnnnnnnnnnnnnnnnnnnnnnnnnnnnnnnnnnnnnnnnnnnnnnnnnnnnnnnnnnnnnnnnnnnnnnnnnnnnnnnnnnnnnnnnnnnnnnnnnnnnnnnnnnnnnnnnnnnnnnnnnnnnnnnnnnnnnnnnnnnnnnnnnnnnnnnnnnnnnnnnnnnnnnnnnnnnnnnnnnnnnnnnnnnnnnnnnnnnnnnnnnnnnnnnnnnnnnnnnnnnnnnnnnnnnnnnnnnnnnnnnnnnnnnnnnnnnnnnnnnnnnnnnnnnnnnnnnnnnnnnnnnnnnnnnnnnnnnnnnnnnnnnnnnnnnnnnnnnnnnnnnnnnnnnnnnnnnnnnnnnnnnnnnnnnnnnnnnnnnnnnnnnnnnnnnnnnnnnnnnnnnnnnnnnnnnnnnnnnnnnnnnnnnnnnnnnnnnnnnnnnnnnnnnnnnnnnnnnnnnnnnnnnnnnnnnnnnnnnnnnnnnnnnnnnnnnnnnnnnnnnnnnnnnnnnnnnnnnnnnnnnnnnnnnnnnnnnnnnnnnnnnnnnnnnnnnnnnnnnnnnnnnnnnnnnnnnnnnnnnnnnnnnnnnnnnnnnnnnnnnnnnnnnnnnnnnnnnnnnnnnnnnnnnnnnnnnnnnnnnnnnnnnnnnnnnnnnnnnnnnnnnnnnnnnnnnnnnnnnnnnnnnnnnnnnnnnnnnnnnnnnnnnnnnnnnnnnnnnnnnnnnnnnnnnnnnnnnnnnnnnnnnnnnnnnnnnnnnnnnnnnnnnnnnnnnnnnnnnnnnnnnnnnnnnnnnnnnnnnnnnnnnnnnnnnnnnnnnnnnnnnnnnnnnnnnnnnnnnnnnnnnnnnnnnnnnnnnnnnnnnnnnnnnnnnnnnnnnnnnnnnnnnnnnnnnnnnnnnnnnnnnnnnnnnnnnnnnnnnnnnnnnnnnnnnnnnnnnnnnnnnnnnnnnnnnnnnnnnnnnnnnnnnnnnnnnnnnnnnnnnnnnnnnnnnnnnnnnnnnnnnnnnnnnnnnnnnnnnnnnnnnnnnnnnnnnnnnnnnnnnnnnnnnnnnnnnnnnnnnnnnnnnnnnnnnnnnnnnnnnnnnnnnnnnnnnnnnnnnnnnnnnnnnnnnnnnnnnnnnnnnnnnnnnnnnnnnnnnnnnnnnnnnnnnnnnnnnnnnnnnnnnnnnnnnnnnnnnnnnnnnnnnnnnnnnnnnnnnnnnnnnnnnnnnnnnnnnnnnnnnnnnnnnnnnnnnnnnnnnnnnnnnnnnnnnnnnnnnnnnnnnnnnnnnnnnnnnnnnnnnnnnnnnnnnnnnnnnnnnnnnnnnnnnnnnnnnnnnnnnnnnnnnnnnnnnnnnnnnnnnnnnnnnnnnnnnnnnnnnnnnnnnnnnnnnnnnnnnnnnnnnnnnnnnnnnnnnnnnnnnnnnnnnnnnnnnnnnnnnnnnnnnnnnnnnnnnnnnnnnnnnnnnnnnnnnnnnnnnnnnnnnnnnnnnnnnnnnnnnnnnnnnnnnnnnnnnnnnnnnnnnnnnnnnnnnnnnnnnnnnnnnnnnnnnnnnnnnnnnnnnnnnnnnnnnnnnnnnnnnnnnnnnnnnnnnnnnnnnnnnnnnnnnnnnnnnnnnnnnnnnnnnnnnnnnnnnnnnnnnnnnnnnnnnnnnnnnnnnnnnnnnnnnnnnnnnnnnnnnnnnnnnnnnnnnnnnnnnnnnnnnnnnnnnnnnnnnnnnnnnnnnnnnnnnnnnnnnnnnnnnnnnnnnnnnnnnnnnnnnnnnnnnnnnnnnnnnnnnnnnnnnnnnnnnnnnnnnnnnnnnnnnnnnnnnnnnnnnnnnnnnnnnnnnnnnnnnnnnnnnnnnnnnnnnnnnnnnnnnnnnnnnnnnnnnnnnnnnnnnnnnnnnnnnnnnnnnnnnnnnnnnnnnnnnnnnnnnnnnnnnnnnnnnnnnnnnnnnnnnnnnnnnnnnnnnnnnnnnnnnnnnnnnnnnnnnnnnnnnnnnnnnnnnnnnnnnnnnnnnnnnnnnnnnnnnnnnnnnnnnnnnnnnnnnnnnnnnnnnnnnnnnnnnnnnnnnnnnnnnnnnnnnnnnnnnnnnnnnnnnnnnnnnnnnnnnnnnnnnnnnnnnnnnnnnnnnnnnnnnnnnnnnnnnnnnnnnnnnnnnnnnnnnnnnnnnnnnnnnnnnnnnnnnnnnnnnnnnnnnnnnnnnnnnnnnnnnnnnnnnnnnnnnnnnnnnnnnnnnnnnnnnnnnnnnnnnnnnnnnnnnnnnnnnnnnnnnnnnnnnnnnnnnnnnnnnnnnnnnnnnnnnnnnnnnnnnnnnnnnnnnnnnnnnnnnnnnnnnnnnnnnnnnnnnnnnnnnnnnnnnnnnnnnnnnnnnnnnnnnnnnnnnnnnnnnnnnnnnnnnnnnnnnnnnnnnnnnnnnnnnnnnnnnnnnnnnnnnnnnnnnnnnnnnnnnnnnnnnnnnnnnnnnnnnnnnnnnnnnnnnnnnnnnnnnnnnnnnnnnnnnnnnnnnnnnnnnnnnnnnnnnnnnnnnnnnnnnnnnnnnnnnnnnnnnnnnnnnnnnnnnnnnnnnnnnnnnnnnnnnnnnnnnnnnnnnnnnnnnnnnnnnnnnnnnnnnnnnnnnnnnnnnnnnnnnnnnnnnnnnnnnnnnnnnnnnnnnnnnnnnnnnnnnnnnnnnnnnnnnnnnnnnnnnnnnnnnnnnnnnnnnnnnnnnnnnnnnnnnnnnnnnnnnnnnnnnnnnnnnnnnnnnnnnnnnnnnnnnnnnnnnnnnnnnnnnnnnnnnnnnnnnnnnnnnnnnnnnnnnnnnnnnnnnnnnnnnnnnnnnnnnnnnnnnnnnnnnnnnnnnnnnnnnnnnnnnnnnnnnnnnnnnnnnnnnnnnnnnnnnnnnnnnnnnnnnnnnnnnnnnnnnnnnnnnnnnnnnnnnnnnnnnnnnnnnnnnnnnnnnnnnnnnnnnnnnnnnnnnnnnnnnnnnnnnnnnnnnnnnnnnnnnnnnnnnnnnnnnnnnnnnnnnnnnnnnnnnnnnnnnnnnnnnnnnnnnnnnnnnnnnnnnnnnnnnnnnnnnnnnnnnnnnnnnnnnnnnnnnnnnnnnnnnnnnnnnnnnnnnnnnnnnnnnnnnnnnnnnnnnnnnnnnnnnnnnnnnnnnnnnnnnnnnnnnnnnnnnnnnnnnnnnnnnnnnnnnnnnnnnnnnnnnnnnnnnnnnnnnnnnnnnnnnnnnnnnnnnnnnnnnnnnnnnnnnnnnnnnnnnnnnnnnnnnnnnnnnnnnnnnnnnnnnnnnnnnnnnnnnnnnnnnnnnnnnnnnnnnnnnnnnnnnnnnnnnnnnnnnnnnnnnnnnnnnnnnnnnnnnnnnnnnnnnnnnnnnnnnnnnnnnnnnnnnnnnnnnnnnnnnnnnnnnnnnnnnnnnnnnnnnnnnnnnnnnnnnnnnnnnnnnnnnnnnnnnnnnnnnnnnnnnnnnnnnnnnnnnnnnnnnnnnnnnnnnnnnnnnnnnnnnnnnnnnnnnnnnnnnnnnnnnnnnnnnnnnnnnnnnnnnnnnnnnnnnnnnnnnnnnnnnnnnnnnnnnnnnnnnnnnnnnnnnnnnnnnnnnnnnnnnnnnnnnnnnnnnnnnnnnnnnnnnnnnnnnnnnnnnnnnnnnnnnnnnnnnnnnnnnnnnnnnnnnnnnnnnnnnnnnnnnnnnnnnnnnnnnnnnnnnnnnnnnnnnnnnnnnnnnnnnnnnnnnnnnnnnnnnnnnnnnnnnnnnnnnnnnnnnnnnnnnnnnnnnnnnnnnnnnnnnnnnnnnnnnnnnnnnnnnnnnnnnnnnnnnnnnnnnnnnnnnnnnnnnnnnnnnnnnnnnnnnnnnnnnnnnnnnnnnnnnnnnnnnnnnnnnnnnnnnnnnnnnnnnnnnnnnnnnnnnnnnnnnnnnnnnnnnnnnnnnnnnnnnnnnnnnnnnnnnnnnnnnnnnnnnnnnnnnnnnnnnnnnnnnnnnnnnnnnnnnnnnnnnnnnnnnnnnnnnnnnnnnnnnnnnnnnnnnnnnnnnnnnnnnnnnnnnnnnnnnnnnnnnnnnnnnnnnnnnnnnnnnnnnnnnnnnnnnnnnnnnnnnnnnnnnnnnnnnnnnnnnnnnnnnnnnnnnnnnnnnnnnnnnnnnnnnnnnnnnnnnnnnnnnnnnnnnnnnnnnnnnnnnnnnnnnnnnnnnnnnnnnnnnnnnnnnnnnnnnnnnnnnnnnnnnnnnnnnnnnnnnnnnnnnnnnnnnnnnnnnnnnnnnnnnnnnnnnnnnnnnnnnnnnnnnnnnnnnnnnnnnnnnnnnnnnnnnnnnnnnnnnnnnnnnnnnnnnnnnnnnnnnnnnnnnnnnnnnnnnnnnnnnnnnnnnnnnnnnnnnnnnnnnnnnnnnnnnnnnnnnnnnnnnnnnnnnnnnnnnnnnnnnnnnnnnnnnnnnnnnnnnnnnnnnnnnnnnnnnnnnnnnnnnnnnnnnnnnnnnnnnnnnnnnnnnnnnnnnnnnnnnnnnnnnnnnnnnnnnnnnnnnnnnnnnnnnnnnnnnnnnnnnnnnnnnnnnnnnnnnnnnnnnnnnnnnnnnnnnnnnnnnnnnnnnnnnnnnnnnnnnnnnnnnnnnnnnnnnnnnnnnnnnnnnnnnnnnnnnnnnnnnnnnnnnnnnnnnnnnnnnnnnnnnnnnnnnnnnnnnnnnnnnnnnnnnnnnnnnnnnnnnnnnnnnnnnnnnnnnnnnnnnnnnnnnnnnnnnnnnnnnnnnnnnnnnnnnnnnnnnnnnnnnnnnnnnnnnnnnnnnnnnnnnnnnnnnnnnnnnnnnnnnnnnnnnnnnnnnnnnnnnnnnnnnnnnnnnnnnnnnnnnnnnnnnnnnnnnnnnnnnnnnnnnnnnnnnnnnnnnnnnnnnnnnnnnnnnnnnnnnnnnnnnnnnnnnnnnnnnnnnnnnnnnnnnnnnnnnnnnnnnnnnnnnnnnnnnnnnnnnnnnnnnnnnnnnnnnnnnnnnnnnnnnnnnnnnnnnnnnnnnnnnnnnnnnnnnnnnnnnnnnnnnnnnnnnnnnnnnnnnnnnnnnnnnnnnnnnnnnnnnnnnnnnnnnnnnnnnnnnnnnnnnnnnnnnnnnnnnnnnnnnnnnnnnnnnnnnnnnnnnnnnnnnnnnnnnnnnnnnnnnnnnnnnnnnnnnnnnnnnnnnnnnnnnnnnnnnnnnnnnnnnnnnnnnnnnnnnnnnnnnnnnnnnnnnnnnnnnnnnnnnnnnnnnnnnnnnnnnnnnnnnnnnnnnnnnnnnnnnnnnnnnnnnnnnnnnnnnnnnnnnnnnnnnnnnnnnnnnnnnnnnnnnnnnnnnnnnnnnnnnnnnnnnnnnnnnnnnnnnnnnnnnnnnnnnnnnnnnnnnnnnnnnnnnnnnnnnnnnnnnnnnnnnnnnnnnnnnnnnnnnnnnnnnnnnnnnnnnnnnnnnnnnnnnnnnnnnnnnnnnnnnnnnnnnnnnnnnnnnnnnnnnnnnnnnnnnnnnnnnnnnnnnnnnnnnnnnnnnnnnnnnnnnnnnnnnnnnnnnnnnnnnnnnnnnnnnnnnnnnnnnnnnnnnnnnnnnnnnnnnnnnnnnnnnnnnnnnnnnnnnnnnnnnnnnnnnnnnnnnnnnnnnnnnnnnnnnnnnnnnnnnnnnnnnnnnnnnnnnnnnnnnnnnnnnnnnnnnnnnnnnnnnnnnnnnnnnnnnnnnnnnnnnnnnnnnnnnnnnnnnnnnnnnnnnnnnnnnnnnnnnnnnnnnnnnnnnnnnnnnnnnnnnnnnnnnnnnnnnnnnnnnnnnnnnnnnnnnnnnnnnnnnnnnnnnnnnnnnnnnnnnnnnnnnnnnnnnnnnnnnnnnnnnnnnnnnnnnnnnnnnnnnnnnnnnnnnnnnnnnnnnnnnnnnnnnnnnnnnnnnnnnnnnnnnnnnnnnnnnnnnnnnnnnnnnnnnnnnnnnnnnnnnnnnnnnnnnnnnnnnnnnnnnnnnnnnnnnnnnnnnnnnnnnnnnnnnnnnnnnnnnnnnnnnnnnnnnnnnnnnnnnnnnnnnnnnnnnnnnnnnnnnnnnnnnnnnnnnnnnnnnnnnnnnnnnnnnnnnnnnnnnnnnnnnnnnnnnnnnnnnnnnnnnnnnnnnnnnnnnnnnnnnnnnnnnnnnnnnnnnnnnnnnnnnnnnnnnnnnnnnnnnnnnnnnnnnnnnnnnnnnnnnnnnnnnnnnnnnnnnnnnnnnnnnnnnnnnnnnnnnnnnnnnnnnnnnnnnnnnnnnnnnnnnnnnnnnnnnnnnnnnnnnnnnnnnnnnnnnnnnnnnnnnnnnnnnnnnnnnnnnnnnnnnnnnnnnnnnnnnnnnnnnnnnnnnnnnnnnnnnnnnnnnnnnnnnnnnnnnnnnnnnnnnnnnnnnnnnnnnnnnnnnnnnnnnnnnnnnnnnnnnnnnnnnnnnnnnnnnnnnnnnnnnnnnnnnnnnnnnnnnnnnnnnnnnnnnnnnnnnnnnnnnnnnnnnnnnnnnnnnnnnnnnnnnnnnnnnnnnnnnnnnnnnnnnnnnnnnnnnnnnnnnnnnnnnnnnnnnnnnnnnnnnnnnnnnnnnnnnnnnnnnnnnnnnnnnnnnnnnnnnnnnnnnnnnnnnnnnnnnnnnnnnnnnnnnnnnnnnnnnnnnnnnnnnnnnnnnnnnnnnnnnnnnnnnnnnnnnnnnnnnnnnnnnnnnnnnnnnnnnnnnnnnnnnnnnnnnnnnnnnnnnnnnnnnnnnnnnnnnnnnnnnnnnnnnnnnnnnnnnnnnnnnnnnnnnnnnnnnnnnnnnnnnnnnnnnnnnnnnnnnnnnnnnnnnnnnnnnnnnnnnnnnnnnnnnnnnnnnnnnnnnnnnnnnnnnnnnnnnnnnnnnnnnnnnnnnnnnnnnnnnnnnnnnnnnnnnnnnnnnnnnnnnnnnnnnnnnnnnnnnnnnnnnnnnnnnnnnnnnnnnnnnnnnnnnnnnnnnnnnnnnnnnnnnnnnnnnnnnnnnnnnnnnnnnnnnnnnnnnnnnnnnnnnnnnnnnnnnnnnnnnnnnnnnnnnnnnnnnnnnnnnnnnnnnnnnnnnnnnnnnnnnnnnnnnnnnnnnnnnnnnnnnnnnnnnnnnnnnnnnnnnnnnnnnnnnnnnnnnnnnnnnnnnnnnnnnnnnnnnnnnnnnnnnnnnnnnnnnnnnnnnnnnnnnnnnnnnnnnnnnnnnnnnnnnnnnnnnnnnnnnnnnnnnnnnnnnnnnnnnnnnnnnnnnnnnnnnnnnnnnnnnnnnnnnnnnnnnnnnnnnnnnnnnnnnnnnnnnnnnnnnnnnnnnnnnnnnnnnnnnnnnnnnnnnnnnnnnnnnnnnnnnnnnnnnnnnnnnnnnnnnnnnnnnnnnnnnnnnnnnnnnnnnnnnnnnnnnnnnnnnnnnnnnnnnnnnnnnnnnnnnnnnnnnnnnnnnnnnnnnnnnnnnnnnnnnnnnnnnnnnnnnnnnnnnnnnnnnnnnnnnnnnnnnnnnnnnnnnnnnnnnnnnnnnnnnnnnnnnnnnnnnnnnnnnnnnnnnnnnnnnnnnnnnnnnnnnnnnnnnnnnnnnnnnnnnnnnnnnnnnnnnnnnnnnnnnnnnnnnnnnnnnnnnnnnnnnnnnnnnnnnnnnnnnnnnnnnnnnnnnnnnnnnnnnnnnnnnnnnnnnnnnnnnnnnnnnnnnnnnnnnnnnnnnnnnnnnnnnnnnnnnnnnnnnnnnnnnnnnnnnnnnnnnnnnnnnnnnnnnnnnnnnnnnnnnnnnnnnnnnnnnnnnnnnnnnnnnnnnnnnnnnnnnnnnnnnnnnnnnnnnnnnnnnnnnnnnnnnnnnnnnnnnnnnnnnnnnnnnnnnnnnnnnnnnnnnnnnnnnnnnnnnnnnnnnnnnnnnnnnnnnnnnnnnnnnnnnnnnnnnnnnnnnnnnnnnnnnnnnnnnnnnnnnnnnnnnnnnnnnnnnnnnnnnnnnnnnnnnnnnnnnnnnnnnnnnnnnnnnnnnnnnnnnnnnnnnnnnnnnnnnnnnnnnnnnnnnnnnnnnnnnnnnnnnnnnnnnnnnnnnnnnnnnnnnnnnnnnnnnnnnnnnnnnnnnnnnnnnnnnnnnnnnnnnnnnnnnnnnnnnnnnnnnnnnnnnnnnnnnnnnnnnnnnnnnnnnnnnnnnnnnnnnnnnnnnnnnnnnnnnnnnnnnnnnnnnnnnnnnnnnnnnnnnnnnnnnnnnnnnnnnnnnnnnnnnnnnnnnnnnnnnnnnnnnnnnnnnnnnnnnnnnnnnnnnnnnnnnnnnnnnnnnnnnnnnnnnnnnnnnnnnnnnnnnnnnnnnnnnnnnnnnnnnnnnnnnnnnnnnnnnnnnnnnnnnnnnnnnnnnnnnnnnnnnnnnnnnnnnnnnnnnnnnnnnnnnnnnnnnnnnnnnnnnnnnnnnnnnnnnnnnnnnnnnnnnnnnnnnnnnnnnnnnnnnnnnnnnnnnnnnnnnnnnnnnnnnnnnnnnnnnnnnnnnnnnnnnnnnnnnnnnnnnnnnnnnnnnnnnnnnnnnnnnnnnnnnnnnnnnnnnnnnnnnnnnnnnnnnnnnnnnnnnnnnnnnnnnnnnnnnnnnnnnnnnnnnnnnnnnnnnnnnnnnnnnnnnnnnnnnnnnnnnnnnnnnnnnnnnnnnnnnnnnnnnnnnnnnnnnnnnnnnnnnnnnnnnnnnnnnnnnnnnnnnnnnnnnnnnnnnnnnnnnnnnnnnnnnnnnnnnnnnnnnnnnnnnnnnnnnnnnnnnnnnnnnnnnnnnnnnnnnnnnnnnnnnnnnnnnnnnnnnnnnnnnnnnnnnnnnnnnnnnnnnnnnnnnnnnnnnnnnnnnnnnnnnnnnnnnnnnnnnnnnnnnnnnnnnnnnnnnnnnnnnnnnnnnnnnnnnnnnnnnnnnnnnnnnnnnnnnnnnnnnnnnnnnnnnnnnnnnnnnnnnnnnnnnnnnnnnnnnnnnnnnnnnnnnnnnnnnnnnnnnnnnnnnnnnnnnnnnnnnnnnnnnnnnnnnnnnnnnnnnnnnnnnnnnnnnnnnnnnnnnnnnnnnnnnnnnnnnnnnnnnnnnnnnnnnnnnnnnnnnnnnnnnnnnnnnnnnnnnnnnnnnnnnnnnnnnnnnnnnnnnnnnnnnnnnnnnnnnnnnnnnnnnnnnnnnnnnnnnnnnnnnnnnnnnnnnnnnnnnnnnnnnnnnnnnnnnnnnnnnnnnnnnnnnnnnnnnnnnnnnnnnnnnnnnnnnnnnnnnnnnnnnnnnnnnnnnnnnnnnnnnnnnnnnnnnnnnnnnnnnnnnnnnnnnnnnnnnnnnnnnnnnnnnnnnnnnnnnnnnnnnnnnnnnnnnnnnnnnnnnnnnnnnnnnnnnnnnnnnnnnnnnnnnnnnnnnnnnnnnnnnnnnnnnnnnnnnnnnnnnnnnnnnnnnnnnnnnnnnnnnnnnnnnnnnnnnnnnnnnnnnnnnnnnnnnnnnnnnnnnnnnnnnnnnnnnnnnnnnnnnnnnnnnnnnnnnnnnnnnnnnnnnnnnnnnnnnnnnnnnnnnnnnnnnnnnnnnnnnnnnnnnnnnnnnnnnnnnnnnnnnnnnnnnnnnnnnnnnnnnnnnnnnnnnnnnnnnnnnnnnnnnnnnnnnnnnnnnnnnnnnnnnnnnnnnnnnnnnnnnnnnnnnnnnnnnnnnnnnnnnnnnnnnnnnnnnnnnnnnnnnnnnnnnnnnnnnnnnnnnnnnnnnnnnnnnnnnnnnnnnnnnnnnnnnnnnnnnnnnnnnnnnnnnnnnnnnnnnnnnnnnnnnnnnnnnnnnnnnnnnnnnnnnnnnnnnnnnnnnnnnnnnnnnnnnnnnnnnnnnnnnnnnnnnnnnnnnnnnnnnnnnnnnnnnnnnnnnnnnnnnnnnnnnnnnnnnnnnnnnnnnnnnnnnnnnnnnnnnnnnnnnnnnnnnnnnnnnnnnnnnnnnnnnnnnnnnnnnnnnnnnnnnnnnnnnnnnnnnnnnnnnnnnnnnnnnnnnnnnnnnnnnnnnnnnnnnnnnnnnnnnnnnnnnnnnnnnnnnnnnnnnnnnnnnnnnnnnnnnnnnnnnnnnnnnnnnnnnnnnnnnnnnnnnnnnnnnnnnnnnnnnnnnnnnnnnnnnnnnnnnnnnnnnnnnnnnnnnnnnnnnnnnnnnnnnnnnnnnnnnnnnnnnnnnnnnnnnnnnnnnnnnnnnnnnnnnnnnnnnnnnnnnnnnnnnnnnnnnnnnnnnnnnnnnnnnnnnnnnnnnnnnnnnnnnnnnnnnnnnnnnnnnnnnnnnnnnnnnnnnnnnnnnnnnnnnnnnnnnnnnnnnnnnnnnnnnnnnnnnnnnnnnnnnnnnnnnnnnnnnnnnnnnnnnnnnnnnnnnnnnnnnnnnnnnnnnnnnnnnnnnnnnnnnnnnnnnnnnnnnnnnnnnnnnnnnnnnnnnnnnnnnnnnnnnnnnnnnnnnnnnnnnnnnnnnnnnnnnnnnnnnnnnnnnnnnnnnnnnnnnnnnnnnnnnnnnnnnnnnnnnnnnnnnnnnnnnnnnnnnnnnnnnnnnnnnnnnnnnnnnnnnnnnnnnnnnnnnnnnnnnnnnnnnnnnnnnnnnnnnnnnnnnnnnnnnnnnnnnnnnnnnnnnnnnnnnnnnnnnnnnnnnnnnnnnnnnnnnnnnnnnnnnnnnnnnnnnnnnnnnnnnnnnnnnnnnnnnnnnnnnnnnnnnnnnnnnnnnnnnnnnnnnnnnnnnnnnnnnnnnnnnnnnnnnnnnnnnnnnnnnnnnnnnnnnnnnnnnnnnnnnnnnnnnnnnnnnnnnnnnnnnnnnnnnnnnnnnnnnnnnnnnnnnnnnnnnnnnnnnnnnnnnnnnnnnnnnnnnnnnnnnnnnnnnnnnnnnnnnnnnnnnnnnnnnnnnnnnnnnnnnnnnnnnnnnnnnnnnnnnnnnnnnnnnnnnnnnnnnnnnnnnnnnnnnnnnnnnnnnnnnnnnnnnnnnnnnnnnnnnnnnnnnnnnnnnnnnnnnnnnnnnnnnnnnnnnnnnnnnnnnnnnnnnnnnnnnnnnnnnnnnnnnnnnnnnnnnnnnnnnnnnnnnnnnnnnnnnnnnnnnnnnnnnnnnnnnnnnnnnnnnnnnnnnnnnnnnnnnnnnnnnnnnnnnnnnnnnnnnnnnnnnnnnnnnnnnnnnnnnnnnnnnnnnnnnnnnnnnnnnnnnnnnnnnnnnnnnnnnnnnnnnnnnnnnnnnnnnnnnnnnnnnnnnnnnnnnnnnnnnnnnnnnnnnnnnnnnnnnnnnnnnnnnnnnnnnnnnnnnnnnnnnnnnnnnnnnnnnnnnnnnnnnnnnnnnnnnnnnnnnnnnnnnnnnnnnnnnnnnnnnnnnnnnnnnnnnnnnnnnnnnnnnnnnnnnnnnnnnnnnnnnnnnnnnnnnnnnnnnnnnnnnnnnnnnnnnnnnnnnnnnnnnnnnnnnnnnnnnnnnnnnnnnnnnnnnnnnnnnnnnnnnnnnnnnnnnnnnnnnnnnnnnnnnnnnnnnnnnnnnnnnnnnnnnnnnnnnnnnnnnnnnnnnnnnnnnnnnnnnnnnnnnnnnnnnnnnnnnnnnnnnnnnnnnnnnnnnnnnnnnnnnnnnnnnnnnnnnnnnnnnnnnnnnnnnnnnnnnnnnnnnnnnnnnnnnnnnnnnnnnnnnnnnnnnnnnnnnnnnnnnnnnnnnnnnnnnnnnnnnnnnnnnnnnnnnnnnnnnnnnnnnnnnnnnnnnnnnnnnnnnnnnnnnnnnnnnnnnnnnnnnnnnnnnnnnnnnnnnnnnnnnnnnnnnnnnnnnnnnnnnnnnnnnnnnnnnnnnnnnnnnnnnnnnnnnnnnnnnnnnnnnnnnnnnnnnnnnnnnnnnnnnnnnnnnnnnnnnnnnnnnnnnnnnnnnnnnnnnnnnnnnnnnnnnnnnnnnnnnnnnnnnnnnnnnnnnnnnnnnnnnnnnnnnnnnnnnnnnnnnnnnnnnnnnnnnnnnnnnnnnnnnnnnnnnnnnnnnnnnnnnnnnnnnnnnnnnnnnnnnnnnnnnnnnnnnnnnnnnnnnnnnnnnnnnnnnnnnnnnnnnnnnnnnnnnnnnnnnnnnnnnnnnnnnnnnnnnnnnnnnnnnnnnnnnnnnnnnnnnnnnnnnnnnnnnnnnnnnnnnnnnnnnnnnnnnnnnnnnnnnnnnnnnnnnnnnnnnnnnnnnnnnnnnnnnnnnnnnnnnnnnnnnnnnnnnnnnnnnnnnnnnnnnnnnnnnnnnnnnnnnnnnnnnnnnnnnnnnnnnnnnnnnnnnnnnnnnnnnnnnnnnnnnnnnnnnnnnnnnnnnnnnnnnnnnnnnnnnnnnnnnnnnnnnnnnnnnnnnnnnnnnnnnnnnnnnnnnnnnnnnnnnnnnnnnnnnnnnnnnnnnnnnnnnnnnnnnnnnnnnnnnnnnnnnnnnnnnnnnnnnnnnnnnnnnnnnnnnnnnnnnnnnnnnnnnnnnnnnnnnnnnnnnnnnnnnnnnnnnnnnnnnnnnnnnnnnnnnnnnnnnnnnnnnnnnnnnnnnnnnnnnnnnnnnnnnnnnnnnnnnnnnnnnnnnnnnnnnnnnnnnnnnnnnnnnnnnnnnnnnnnnnnnnnnnnnnnnnnnnnnnnnnnnnnnnnnnnnnnnnnnnnnnnnnnnnnnnnnnnnnnnnnnnnnnnnnnnnnnnnnnnnnnnnnnnnnnnnnnnnnnnnnnnnnnnnnnnnnnnnnnnnnnnnnnnnnnnnnnnnnnnnnnnnnnnnnnnnnnnnnnnnnnnnnnnnnnnnnnnnnnnnnnnnnnnnnnnnnnnnnnnnnnnnnnnnnnnnnnnnnnnnnnnnnnnnnnnnnnnnnnnnnnnnnnnnnnnnnnnnnnnnnnnnnnnnnnnnnnnnnnnnnnnnnnnnnnnnnnnnnnnnnnnnnnnnnnnnnnnnnnnnnnnnnnnnnnnnnnnnnnnnnnnnnnnnnnnnnnnnnnnnnnnnnnnnnnnnnnnnnnnnnnnnnnnnnnnnnnnnnnnnnnnnnnnnnnnnnnnnnnnnnnnnnnnnnnnnnnnnnnnnnnnnnnnnnnnnnnnnnnnnnnnnnnnnnnnnnnnnnnnnnnnnnnnnnnnnnnnnnnnnnnnnnnnnnnnnnnnnnnnnnnnnnnnnnnnnnnnnnnnnnnnnnnnnnnnnnnnnnnnnnnnnnnnnnnnnnnnnnnnnnnnnnnnnnnnnnnnnnnnnnnnnnnnnnnnnnnnnnnnnnnnnnnnnnnnnnnnnnnnnnnnnnnnnnnnnnnnnnnnnnnnnnnnnnnnnnnnnnnnnnnnnnnnnnnnnnnnnnnnnnnnnnnnnnnnnnnnnnnnnnnnnnnnnnnnnnnnnnnnnnnnnnnnnnnnnnnnnnnnnnnnnnnnnnnnnnnnnnnnnnnnnnnnnnnnnnnnnnnnnnnnnnnnnnnnnnnnnnnnnnnnnnnnnnnnnnnnnnnnnnnnnnnnnnnnnnnnnnnnnnnnnnnnnnnnnnnnnnnnnnnnnnnnnnnnnnnnnnnnnnnnnnnnnnnnnnnnnnnnnnnnnnnnnnnnnnnnnnnnnnnnnnnnnnnnnnnnnnnnnnnnnnnnnnnnnnnnnnnnnnnnnnnnnnnnnnnnnnnnnnnnnnnnnnnnnnnnnnnnnnnnnnnnnnnnnnnnnnnnnnnnnnnnnnnnnnnnnnnnnnnnnnnnnnnnnnnnnnnnnnnnnnnnnnnnnnnnnnnnnnnnnnnnnnnnnnnnnnnnnnnnnnnnnnnnnnnnnnnnnnnnnnnnnnnnnnnnnnnnnnnnnnnnnnnnnnnnnnnnnnnnnnnnnnnnnnnnnnnnnnnnnnnnnnnnnnnnnnnnnnnnnnnnnnnnnnnnnnnnnnnnnnnnnnnnnnnnnnnnnnnnnnnnnnnnnnnnnnnnnnnnnnnnnnnnnnnnnnnnnnnnnnnnnnnnnnnnnnnnnnnnnnnnnnnnnnnnnnnnnnnnnnnnnnnnnnnnnnnnnnnnnnnnnnnnnnnnnnnnnnnnnnnnnnnnnnnnnnnnnnnnnnnnnnnnnnnnnnnnnnnnnnnnnnnnnnnnnnnnnnnnnnnnnnnnnnnnnnnnnnnnnnnnnnnnnnnnnnnnnnnnnnnnnnnnnnnnnnnnnnnnnnnnnnnnnnnnnnnnnnnnnnnnnnnnnnnnnnnnnnnnnnnnnnnnnnnnnnnnnnnnnnnnnnnnnnnnnnnnnnnnnnnnnnnnnnnnnnnnnnnnnnnnnnnnnnnnnnnnnnnnnnnnnnnnnnnnnnnnnnnnnnnnnnnnnnnnnnnnnnnnnnnnnnnnnnnnnnnnnnnnnnnnnnnnnnnnnnnnnnnnnnnnnnnnnnnnnnnnnnnnnnnnnnnnnnnnnnnnnnnnnnnnnnnnnnnnnnnnnnnnnnnnnnnnnnnnnnnnnnnnnnnnnnnnnnnnnnnnnnnnnnnnnnnnnnnnnnnnnnnnnnnnnnnnnnnnnnnnnnnnnnnnnnnnnnnnnnnnnnnnnnnnnnnnnnnnnnnnnnnnnnnnnnnnnnnnnnnnnnnnnnnnnnnnnnnnnnnnnnnnnnnnnnnnnnnnnnnnnnnnnnnnnnnnnnnnnnnnnnnnnnnnnnnnnnnnnnnnnnnnnnnnnnnnnnnnnnnnnnnnnnnnnnnnnnnnnnnnnnnnnnnnnnnnnnnnnnnnnnnnnnnnnnnnnnnnnnnnnnnnnnnnnnnnnnnnnnnnnnnnnnnnnnnnnnnnnnnnnnnnnnnnnnnnnnnnnnnnnnnnnnnnnnnnnnnnnnnnnnnnnnnnnnnnnnnnnnnnnnnnnnnnnnnnnnnnnnnnnnnnnnnnnnnnnnnnnnnnnnnnnnnnnnnnnnnnnnnnnnnnnnnnnnnnnnnnnnnnnnnnnnnnnnnnnnnnnnnnnnnnnnnnnnnnnnnnnnnnnnnnnnnnnnnnnnnnnnnnnnnnnnnnnnnnnnnnnnnnnnnnnnnnnnnnnnnnnnnnnnnnnnnnnnnnnnnnnnnnnnnnnnnnnnnnnnnnnnnnnnnnnnnnnnnnnnnnnnnnnnnnnnnnnnnnnnnnnnnnnnnnnnnnnnnnnnnnnnnnnnnnnnnnnnnnnnnnnnnnnnnnnnnnnnnnnnnnnnnnnnnnnnnnnnnnnnnnnnnnnnnnnnnnnnnnnnnnnnnnnnnnnnnnnnnnnnnnnnnnnnnnnnnnnnnnnnnnnnnnnnnnnnnnnnnnnnnnnnnnnnnnnnnnnnnnnnnnnnnnnnnnnnnnnnnnnnnnnnnnnnnnnnnnnnnnnnnnnnnnnnnnnnnnnnnnnnnnnnnnnnnnnnnnnnnnnnnnnnnnnnnnnnnnnnnnnnnnnnnnnnnnnnnnnnnnnnnnnnnnnnnnnnnnnnnnnnnnnnnnnnnnnnnnnnnnnnnnnnnnnnnnnnnnnnnnnnnnnnnnnnnnnnnnnnnnnnnnnnnnnnnnnnnnnnnnnnnnnnnnnnnnnnnnnnnnnnnnnnnnnnnnnnnnnnnnnnnnnnnnnnnnnnnnnnnnnnnnnnnnnnnnnnnnnnnnnnnnnnnnnnnnnnnnnnnnnnnnnnnnnnnnnnnnnnnnnnnnnnnnnnnnnnnnnnnnnnnnnnnnnnnnnnnnnnnnnnnnnnnnnnnnnnnnnnnnnnnnnnnnnnnnnnnnnnnnnnnnnnnnnnnnnnnnnnnnnnnnnnnnnnnnnnnnnnnnnnnnnnnnnnnnnnnnnnnnnnnnnnnnnnnnnnnnnnnnnnnnnnnnnnnnnnnnnnnnnnnnnnnnnnnnnnnnnnnnnnnnnnnnnnnnnnnnnnnnnnnnnnnnnnnnnnnnnnnnnnnnnnnnnnnnnnnnnnnnnnnnnnnnnnnnnnnnnnnnnnnnnnnnnnnnnnnnnnnnnnnnnnnnnnnnnnnnnnnnnnnnnnnnnnnnnnnnnnnnnnnnnnnnnnnnnnnnnnnnnnnnnnnnnnnnnnnnnnnnnnnnnnnnnnnnnnnnnnnnnnnnnnnnnnnnnnnnnnnnnnnnnnnnnnnnnnnnnnnnnnnnnnnnnnnnnnnnnnnnnnnnnnnnnnnnnnnnnnnnnnnnnnnnnnnnnnnnnnnnnnnnnnnnnnnnnnnnnnnnnnnnnnnnnnnnnnnnnnnnnnnnnnnnnnnnnnnnnnnnnnnnnnnnnnnnnnnnnnnnnnnnnnnnnnnnnnnnnnnnnnnnnnnnnnnnnnnnnnnnnnnnnnnnnnnnnnnnnnnnnnnnnnnnnnnnnnnnnnnnnnnnnnnnnnnnnnnnnnnnnnnnnnnnnnnnnnnnnnnnnnnnnnnnnnnnnnnnnnnnnnnnnnnnnnnnnnnnnnnnnnnnnnnnnnnnnnnnnnnnnnnnnnnnnnnnnnnnnnnnnnnnnnnnnnnnnnnnnnnnnnnnnnnnnnnnnnnnnnnnnnnnnnnnnnnnnnnnnnnnnnnnnnnnnnnnnnnnnnnnnnnnnnnnnnnnnnnnnnnnnnnnnnnnnnnnnnnnnnnnnnnnnnnnnnnnnnnnnnnnnnnnnnnnnnnnnnnnnnnnnnnnnnnnnnnnnnnnnnnnnnnnnnnnnnnnnnnnnnnnnnnnnnnnnnnnnnnnnnnnnnnnnnnnnnnnnnnnnnnnnnnnnnnnnnnnnnnnnnnnnnnnnnnnnnnnnnnnnnnnnnnnnnnnnnnnnnnnnnnnnnnnnnnnnnnnnnnnnnnnnnnnnnnnnnnnnnnnnnnnnnnnnnnnnnnnnnnnnnnnnnnnnnnnnnnnnnnnnnnnnnnnnnnnnnnnnnnnnnnnnnnnnnnnnnnnnnnnnnnnnnnnnnnnnnnnnnnnnnnnnnnnnnnnnnnnnnnnnnnnnnnnnnnnnnnnnnnnnnnnnnnnnnnnnnnnnnnnnnnnnnnnnnnnnnnnnnnnnnnnnnnnnnnnnnnnnnnnnnnnnnnnnnnnnnnnnnnnnnnnnnnnnnnnnnnnnnnnnnnnnnnnnnnnnnnnnnnnnnnnnnnnnnnnnnnnnnnnnnnnnnnnnnnnnnnnnnnnnnnnnnnnnnnnnnnnnnnnnnnnnnnnnnnnnnnnnnnnnnnnnnnnnnnnnnnnnnnnnnnnnnnnnnnnnnnnnnnnnnnnnnnnnnnnnnnnnnnnnnnnnnnnnnnnnnnnnnnnnnnnnnnnnnnnnnnnnnnnnnnnnnnnnnnnnnnnnnnnnnnnnnnnnnnnnnnnnnnnnnnnnnnnnnnnnnnnnnnnnnnnnnnnnnnnnnnnnnnnnnnnnnnnnnnnnnnnnnnnnnnnnnnnnnnnnnnnnnnnnnnnnnnnnnnnnnnnnnnnnnnnnnnnnnnnnnnnnnnnnnnnnnnnnnnnnnnnnnnnnnnnnnnnnnnnnnnnnnnnnnnnnnnnnnnnnnnnnnnnnnnnnnnnnnnnnnnnnnnnnnnnnnnnnnnnnnnnnnnnnnnnnnnnnnnnnnnnnnnnnnnnnnnnnnnnnnnnnnnnnnnnnnnnnnnnnnnnnnnnnnnnnnnnnnnnnnnnnnnnnnnnnnnnnnnnnnnnnnnnnnnnnnnnnnnnnnnnnnnnnnnnnnnnnnnnnnnnnnnnnnnnnnnnnnnnnnnnnnnnnnnnnnnnnnnnnnnnnnnnnnnnnnnnnnnnnnnnnnnnnnnnnnnnnnnnnnnnnnnnnnnnnnnnnnnnnnnnnnnnnnnnnnnnnnnnnnnnnnnnnnnnnnnnnnnnnnnnnnnnnnnnnnnnnnnnnnnnnnnnnnnnnnnnnnnnnnnnnnnnnnnnnnnnnnnnnnnnnnnnnnnnnnnnnnnnnnnnnnnnnnnnnnnnnnnnnnnnnnnnnnnnnnnnnnnnnnnnnnnnnnnnnnnnnnnnnnnnnnnnnnnnnnnnnnnnnnnnnnnnnnnnnnnnnnnnnnnnnnnnnnnnnnnnnnnnnnnnnnnnnnnnnnnnnnnnnnnnnnnnnnnnnnnnnnnnnnnnnnnnnnnnnnnnnnnnnnnnnnnnnnnnnnnnnnnnnnnnnnnnnnnnnnnnnnnnnnnnnnnnnnnnnnnnnnnnnnnnnnnnnnnnnnnnnnnnnnnnnnnnnnnnnnnnnnnnnnnnnnnnnnnnnnnnnnnnnnnnnnnnnnnnnnnnnnnnnnnnnnnnnnnnnnnnnnnnnnnnnnnnnnnnnnnnnnnnnnnnnnnnnnnnnnnnnnnnnnnnnnnnnnnnnnnnnnnnnnnnnnnnnnnnnnnnnnnnnnnnnnnnnnnnnnnnnnnnnnnnnnnnnnnnnnnnnnnnnnnnnnnnnnnnnnnnnnnnnnnnnnnnnnnnnnnnnnnnnnnnnnnnnnnnnnnnnnnnnnnnnnnnnnnnnnnnnnnnnnnnnnnnnnnnnnnnnnnnnnnnnnnnnnnnnnnnnnnnnnnnnnnnnnnnnnnnnnnnnnnnnnnnnnnnnnnnnnnnnnnnnnnnnnnnnnnnnnnnnnnnnnnnnnnnnnnnnnnnnnnnnnnnnnnnnnnnnnnnnnnnnnnnnnnnnnnnnnnnnnnnnnnnnnnnnnnnnnnnnnnnnnnnnnnnnnnnnnnnnnnnnnnnnnnnnnnnnnnnnnnnnnnnnnnnnnnnnnnnnnnnnnnnnnnnnnnnnnnnnnnnnnnnnnnnnnnnnnnnnnnnnnnnnnnnnnnnnnnnnnnnnnnnnnnnnnnnnnnnnnnnnnnnnnnnnnnnnnnnnnnnnnnnnnnnnnnnnnnnnnnnnnnnnnnnnnnnnnnnnnnnnnnnnnnnnnnnnnnnnnnnnnnnnnnnnnnnnnnnnnnnnnnnnnnnnnnnnnnnnnnnnnnnnnnnnnnnnnnnnnnnnnnnnnnnnnnnnnnnnnnnnnnnnnnnnnnnnnnnnnnnnnnnnnnnnnnnnnnnnnnnnnnnnnnnnnnnnnnnnnnnnnnnnnnnnnnnnnnnnnnnnnnnnnnnnnnnnnnnnnnnnnnnnnnnnnnnnnnnnnnnnnnnnnnnnnnnnnnnnnnnnnnnnnnnnnnnnnnnnnnnnnnnnnnnnnnnnnnnnnnnnnnnnnnnnnnnnnnnnnnnnnnnnnnnnnnnnnnnnnnnnnnnnnnnnnnnnnnnnnnnnnnnnnnnnnnnnnnnnnnnnnnnnnnnnnnnnnnnnnnnnnnnnnnnnnnnnnnnnnnnnnnnnnnnnnnnnnnnnnnnnnnnnnnnnnnnnnnnnnnnnnnnnnnnnnnnnnnnnnnnnnnnnnnnnnnnnnnnnnnnnnnnnnnnnnnnnnnnnnnnnnnnnnnnnnnnnnnnnnnnnnnnnnnnnnnnnnnnnnnnnnnnnnnnnnnnnnnnnnnnnnnnnnnnnnnnnnnnnnnnnnnnnnnnnnnnnnnnnnnnnnnnnnnnnnnnnnnnnnnnnnnnnnnnnnnnnnnnnnnnnnnnnnnnnnnnnnnnnnnnnnnnnnnnnnnnnnnnnnnnnnnnnnnnnnnnnnnnnnnnnnnnnnnnnnnnnnnnnnnnnnnnnnnnnnnnnnnnnnnnnnnnnnnnnnnnnnnnnnnnnnnnnnnnnnnnnnnnnnnnnnnnnnnnnnnnnnnnnnnnnnnnnnnnnnnnnnnnnnnnnnnnnnnnnnnnnnnnnnnnnnnnnnnnnnnnnnnnnnnnnnnnnnnnnnnnnnnnnnnnnnnnnnnnnnnnnnnnnnnnnnnnnnnnnnnnnnnnnnnnnnnnnnnnnnnnnnnnnnnnnnnnnnnnnnnnnnnnnnnnnnnnnnnnnnnnnnnnnnnnnnnnnnnnnnnnnnnnnnnnnnnnnnnnnnnnnnnnnnnnnnnnnnnnnnnnnnnnnnnnnnnnnnnnnnnnnnnnnnnnnnnnnnnnnnnnnnnnnnnnnnnnnnnnnnnnnnnnnnnnnnnnnnnnnnnnnnnnnnnnnnnnnnnnnnnnnnnnnnnnnnnnnnnnnnnnnnnnnnnnnnnnnnnnnnnnnnnnnnnnnnnnnnnnnnnnnnnnnnnnnnnnnnnnnnnnnnnnnnnnnnnnnnnnnnnnnnnnnnnnnnnnnnnnnnnnnnnnnnnnnnnnnnnnnnnnnnnnnnnnnnnnnnnnnnnnnnnnnnnnnnnnnnnnnnnnnnnnnnnnnnnnnnnnnnnnnnnnnnnnnnnnnnnnnnnnnnnnnnnnnnnnnnnnnnnnnnnnnnnnnnnnnnnnnnnnnnnnnnnnnnnnnnnnnnnnnnnnnnnnnnnnnnnnnnnnnnnnnnnnnnnnnnnnnnnnnnnnnnnnnnnnnnnnnnnnnnnnnnnnnnnnnnnnnnnnnnnnnnnnnnnnnnnnnnnnnnnnnnnnnnnnnnnnnnnnnnnnnnnnnnnnnnnnnnnnnnnnnnnnnnnnnnnnnnnnnnnnnnnnnnnnnnnnnnnnnnnnnnnnnnnnnnnnnnnnnnnnnnnnnnnnnnnnnnnnnnnnnnnnnnnnnnnnnnnnnnnnnnnnnnnnnnnnnnnnnnnnnnnnnnnnnnnnnnnnnnnnnnnnnnnnnnnnnnnnnnnnnnnnnnnnnnnnnnnnnnnnnnnnnnnnnnnnnnnnnnnnnnnnnnnnnnnnnnnnnnnnnnnnnnnnnnnnnnnnnnnnnnnnnnnnnnnnnnnnnnnnnnnnnnnnnnnnnnnnnnnnnnnnnnnnnnnnnnnnnnnnnnnnnnnnnnnnnnnnnnnnnnnnnnnnnnnnnnnnnnnnnnnnnnnnnnnnnnnnnnnnnnnnnnnnnnnnnnnnnnnnnnnnnnnnnnnnnnnnnnnnnnnnnnnnnnnnnnnnnnnnnnnnnnnnnnnnnnnnnnnnnnnnnnnnnnnnnnnnnnnnnnnnnnnnnnnnnnnnnnnnnnnnnnnnnnnnnnnnnnnnnnnnnnnnnnnnnnnnnnnnnnnnnnnnnnnnnnnnnnnnnnnnnnnnnnnnnnnnnnnnnnnnnnnnnnnnnnnnnnnnnnnnnnnnnnnnnnnnnnnnnnnnnnnnnnnnnnnnnnnnnnnnnnnnnnnnnnnnnnnnnnnnnnnnnnnnnnnnnnnnnnnnnnnnnnnnnnnnnnnnnnnnnnnnnnnnnnnnnnnnnnnnnnnnnnnnnnnnnnnnnnnnnnnnnnnnnnnnnnnnnnnnnnnnnnnnnnnnnnnnnnnnnnnnnnnnnnnnnnnnnnnnnnnnnnnnnnnnnnnnnnnnnnnnnnnnnnnnnnnnnnnnnnnnnnnnnnnnnnnnnnnnnnnnnnnnnnnnnnnnnnnnnnnnnnnnnnnnnnnnnnnnnnnnnnnnnnnnnnnnnnnnnnnnnnnnnnnnnnnnnnnnnnnnnnnnnnnnnnnnnnnnnnnnnnnnnnnnnnnnnnnnnnnnnnnnnnnnnnnnnnnnnnnnnnnnnnnnnnnnnnnnnnnnnnnnnnnnnnnnnnnnnnnnnnnnnnnnnnnnnnnnnnnnnnnnnnnnnnnnnnnnnnnnnnnnnnnnnnnnnnnnnnnnnnnnnnnnnnnnnnnnnnnnnnnnnnnnnnnnnnnnnnnnnnnnnnnnnnnnnnnnnnnnnnnnnnnnnnnnnnnnnnnnnnnnnnnnnnnnnnnnnnnnnnnnnnnnnnnnnnnnnnnnnnnnnnnnnnnnnnnnnnnnnnnnnnnnnnnnnnnnnnnnnnnnnnnnnnnnnnnnnnnnnnnnnnnnnnnnnnnnnnnnnnnnnnnnnnnnnnnnnnnnnnnnnnnnnnnnnnnnnnnnnnnnnnnnnnnnnnnnnnnnnnnnnnnnnnnnnnnnnnnnnnnnnnnnnnnnnnnnnnnnnnnnnnnnnnnnnnnnnnnnnnnnnnnnnnnnnnnnnnnnnnnnnnnnnnnnnnnnnnnnnnnnnnnnnnnnnnnnnnnnnnnnnnnnnnnnnnnnnnnnnnnnnnnnnnnnnnnnnnnnnnnnnnnnnnnnnnnnnnnnnnnnnnnnnnnnnnnnnnnnnnnnnnnnnnnnnnnnnnnnnnnnnnnnnnnnnnnnnnnnnnnnnnnnnnnnnnnnnnnnnnnnnnnnnnnnnnnnnnnnnnnnnnnnnnnnnnnnnnnnnnnnnnnnnnnnnnnnnnnnnnnnnnnnnnnnnnnnnnnnnnnnnnnnnnnnnnnnnnnnnnnnnnnnnnnnnnnnnnnnnnnnnnnnnnnnnnnnnnnnnnnnnnnnnnnnnnnnnnnnnnnnnnnnnnnnnnnnnnnnnnnnnnnnnnnnnnnnnnnnnnnnnnnnnnnnnnnnnnnnnnnnnnnnnnnnnnnnnnnnnnnnnnnnnnnnnnnnnnnnnnnnnnnnnnnnnnnnnnnnnnnnnnnnnnnnnnnnnnnnnnnnnnnnnnnnnnnnnnnnnnnnnnnnnnnnnnnnnnnnnnnnnnnnnnnnnnnnnnnnnnnnnnnnnnnnnnnnnnnnnnnnnnnnnnnnnnnnnnnnnnnnnnnnnnnnnnnnnnnnnnnnnnnnnnnnnnnnnnnnnnnnnnnnnnnnnnnnnnnnnnnnnnnnnnnnnnnnnnnnnnnnnnnnnnnnnnnnnnnnnnnnnnnnnnnnnnnnnnnnnnnnnnnnnnnnnnnnnnnnnnnnnnnnnnnnnnnnnnnnnnnnnnnnnnnnnnnnnnnnnnnnnnnnnnnnnnnnnnnnnnnnnnnnnnnnnnnnnnnnnnnnnnnnnnnnnnnnnnnnnnnnnnnnnnnnnnnnnnnnnnnnnnnnnnnnnnnnnnnnnnnnnnnnnnnnnnnnnnnnnnnnnnnnnnnnnnnnnnnnnnnnnnnnnnnnnnnnnnnnnnnnnnnnnnnnnnnnnnnnnnnnnnnnnnnnnnnnnnnnnnnnnnnnnnnnnnnnnnnnnnnnnnnnnnnnnnnnnnnnnnnnnnnnnnnnnnnnnnnnnnnnnnnnnnnnnnnnnnnnnnnnnnnnnnnnnnnnnnnnnnnnnnnnnnnnnnnnnnnnnnnnnnnnnnnnnnnnnnnnnnnnnnnnnnnnnnnnnnnnnnnnnnnnnnnnnnnnnnnnnnnnnnnnnnnnnnnnnnnnnnnnnnnnnnnnnnnnnnnnnnnnnnnnnnnnnnnnnnnnnnnnnnnnnnnnnnnnnnnnnnnnnnnnnnnnnnnnnnnnnnnnnnnnnnnnnnnnnnnnnnnnnnnnnnnnnnnnnnnnnnnnnnnnnnnnnnnnnnnnnnnnnnnnnnnnnnnnnnnnnnnnnnnnnnnnnnnnnnnnnnnnnnnnnnnnnnnnnnnnnnnnnnnnnnnnnnnnnnnnnnnnnnnnnnnnnnnnnnnnnnnnnnnnnnnnnnnnnnnnnnnnnnnnnnnnnnnnnnnnnnnnnnnnnnnnnnnnnnnnnnnnnnnnnnnnnnnnnnnnnnnnnnnnnnnnnnnnnnnnnnnnnnnnnnnnnnnnnnnnnnnnnnnnnnnnnnnnnnnnnnnnnnnnnnnnnnnnnnnnnnnnnnnnnnnnnnnnnnnnnnnnnnnnnnnnnnnnnnnnnnnnnnnnnnnnnnnnnnnnnnnnnnnnnnnnnnnnnnnnnnnnnnnnnnnnnnnnnnnnnnnnnnnnnnnnnnnnnnnnnnnnnnnnnnnnnnnnnnnnnnnnnnnnnnnnnnnnnnnnnnnnnnnnnnnnnnnnnnnnnnnnnnnnnnnnnnnnnnnnnnnnnnnnnnnnnnnnnnnnnnnnnnnnnnnnnnnnnnnnnnnnnnnnnnnnnnnnnnnnnnnnnnnnnnnnnnnnnnnnnnnnnnnnnnnnnnnnnnnnnnnnnnnnnnnnnnnnnnnnnnnnnnnnnnnnnnnnnnnnnnnnnnnnnnnnnnnnnnnnnnnnnnnnnnnnnnnnnnnnnnnnnnnnnnnnnnnnnnnnnnnnnnnnnnnnnnnnnnnnnnnnnnnnnnnnnnnnnnnnnnnnnnnnnnnnnnnnnnnnnnnnnnnnnnnnnnnnnnnnnnnnnnnnnnnnnnnnnnnnnnnnnnnnnnnnnnnnnnnnnnnnnnnnnnnnnnnnnnnnnnnnnnnnnnnnnnnnnnnnnnnnnnnnnnnnnnnnnnnnnnnnnnnnnnnnnnnnnnnnnnnnnnnnnnnnnnnnnnnnnnnnnnnnnnnnnnnnnnnnnnnnnnnnnnnnnnnnnnnnnnnnnnnnnnnnnnnnnnnnnnnnnnnnnnnnnnnnnnnnnnnnnnnnnnnnnnnnnnnnnnnnnnnnnnnnnnnnnnnnnnnnnnnnnnnnnnnnnnnnnnnnnnnnnnnnnnnnnnnnnnnnnnnnnnnnnnnnnnnnnnnnnnnnnnnnnnnnnnnnnnnnnnnnnnnnnnnnnnnnnnnnnnnnnnnnnnnnnnnnnnnnnnnnnnnnnnnnnnnnnnnnnnnnnnnnnnnnnnnnnnnnnnnnnnnnnnnnnnnnnnnnnnnnnnnnnnnnnnnnnnnnnnnnnnnnnnnnnnnnnnnnnnnnnnnnnnnnnnnnnnnnnnnnnnnnnnnnnnnnnnnnnnnnnnnnnnnnnnnnnnnnnnnnnnnnnnnnnnnnnnnnnnnnnnnnnnnnnnnnnnnnnnnnnnnnnnnnnnnnnnnnnnnnnnnnnnnnnnnnnnnnnnnnnnnnnnnnnnnnnnnnnnnnnnnnnnnnnnnnnnnnnnnnnnnnnnnnnnnnnnnnnnnnnnnnnnnnnnnnnnnnnnnnnnnnnnnnnnnnnnnnnnnnnnnnnnnnnnnnnnnnnnnnnnnnnnnnnnnnnnnnnnnnnnnnnnnnnnnnnnnnnnnnnnnnnnnnnnnnnnnnnnnnnnnnnnnnnnnnnnnnnnnnnnnnnnnnnnnnnnnnnnnnnnnnnnnnnnnnnnnnnnnnnnnnnnnnnnnnnnnnnnnnnnnnnnnnnnnnnnnnnnnnnnnnnnnnnnnnnnnnnnnnnnnnnnnnnnnnnnnnnnnnnnnnnnnnnnnnnnnnnnnnnnnnnnnnnnnnnnnnnnnnnnnnnnnnnnnnnnnnnnnnnnnnnnnnnnnnnnnnnnnnnnnnnnnnnnnnnnnnnnnnnnnnnnnnnnnnnnnnnnnnnnnnnnnnnnnnnnnnnnnnnnnnnnnnnnnnnnnnnnnnnnnnnnnnnnnnnnnnnnnnnnnnnnnnnnnnnnnnnnnnnnnnnnnnnnnnnnnnnnnnnnnnnnnnnnnnnnnnnnnnnnnnnnnnnnnnnnnnnnnnnnnnnnnnnnnnnnnnnnnnnnnnnnnnnnnnnnnnnnnnnnnnnnnnnnnnnnnnnnnnnnnnnnnnnnnnnnnnnnnnnnnnnnnnnnnnnnnnnnnnnnnnnnnnnnnnnnnnnnnnnnnnnnnnnnnnnnnnnnnnnnnnnnnnnnnnnnnnnnnnnnnnnnnnnnnnnnnnnnnnnnnnnnnnnnnnnnnnnnnnnnnnnnnnnnnnnnnnnnnnnnnnnnnnnnnnnnnnnnnnnnnnnnnnnnnnnnnnnnnnnnnnnnnnnnnnnnnnnnnnnnnnnnnnnnnnnnnnnnnnnnnnnnnnnnnnnnnnnnnnnnnnnnnnnnnnnnnnnnnnnnnnnnnnnnnnnnnnnnnnnnnnnnnnnnnnnnnnnnnnnnnnnnnnnnnnnnnnnnnnnnnnnnnnnnnnnnnnnnnnnnnnnnnnnnnnnnnnnnnnnnnnnnnnnnnnnnnnnnnnnnnnnnnnnnnnnnnnnnnnnnnnnnnnnnnnnnnnnnnnnnnnnnnnnnnnnnnnnnnnnnnnnnnnnnnnnnnnnnnnnnnnnnnnnnnnnnnnnnnnnnnnnnnnnnnnnnnnnnnnnnnnnnnnnnnnnnnnnnnnnnnnnnnnnnnnnnnnnnnnnnnnnnnnnnnnnnnnnnnnnnnnnnnnnnnnnnnnnnnnnnnnnnnnnnnnnnnnnnnnnnnnnnnnnnnnnnnnnnnnnnnnnnnnnnnnnnnnnnnnnnnnnnnnnnnnnnnnnnnnnnnnnnnnnnnnnnnnnnnnnnnnnnnnnnnnnnnnnnnnnnnnnnnnnnnnnnnnnnnnnnnnnnnnnnnnnnnnnnnnnnnnnnnnnnnnnnnnnnnnnnnnnnnnnnnnnnnnnnnnnnnnnnnnnnnnnnnnnnnnnnnnnnnnnnnnnnnnnnnnnnnnnnnnnnnnnnnnnnnnnnnnnnnnnnnnnnnnnnnnnnnnnnnnnnnnnnnnnnnnnnnnnnnnnnnnnnnnnnnnnnnnnnnnnnnnnnnnnnnnnnnnnnnnnnnnnnnnnnnnnnnnnnnnnnnnnnnnnnnnnnnnnnnnnnnnnnnnnnnnnnnnnnnnnnnnnnnnnnnnnnnnnnnnnnnnnnnnnnnnnnnnnnnnnnnnnnnnnnnnnnnnnnnnnnnnnnnnnnnnnnnnnnnnnnnnnnnnnnnnnnnnnnnnnnnnnnnnnnnnnnnnnnnnnnnnnnnnnnnnnnnnnnnnnnnnnnnnnnnnnnnnnnnnnnnnnnnnnnnnnnnnnnnnnnnnnnnnnnnnnnnnnnnnnnnnnnnnnnnnnnnnnnnnnnnnnnnnnnnnnnnnnnnnnnnnnnnnnnnnnnnnnnnnnnnnnnnnnnnnnnnnnnnnnnnnnnnnnnnnnnnnnnnnnnnnnnnnnnnnnnnnnnnnnnnnnnnnnnnnnnnnnnnnnnnnnnnnnnnnnnnnnnnnnnnnnnnnnnnnnnnnnnnnnnnnnnnnnnnnnnnnnnnnnnnnnnnnnnnnnnnnnnnnnnnnnnnnnnnnnnnnnnnnnnnnnnnnnnnnnnnnnnnnnnnnnnnnnnnnnnnnnnnnnnnnnnnnnnnnnnnnnnnnnnnnnnnnnnnnnnnnnnnnnnnnnnnnnnnnnnnnnnnnnnnnnnnnnnnnnnnnnnnnnnnnnnnnnnnnnnnnnnnnnnnnnnnnnnnnnnnnnnnnnnnnnnnnnnnnnnnnnnnnnnnnnnnnnnnnnnnnnnnnnnnnnnnnnnnnnnnnnnnnnnnnnnnnnnnnnnnnnnnnnnnnnnnnnnnnnnnnnnnnnnnnnnnnnnnnnnnnnnnnnnnnnnnnnnnnnnnnnnnnnnnnnnnnnnnnnnnnnnnnnnnnnnnnnnnnnnnnnnnnnnnnnnnnnnnnnnnnnnnnnnnnnnnnnnnnnnnnnnnnnnnnnnnnnnnnnnnnnnnnnnnnnnnnnnnnnnnnnnnnnnnnnnnnnnnnnnnnnnnnnnnnnnnnnnnnnnnnnnnnnnnnnnnnnnnnnnnnnnnnnnnnnnnnnnnnnnnnnnnnnnnnnnnnnnnnnnnnnnnnnnnnnnnnnnnnnnnnnnnnnnnnnnnnnnnnnnnnnnnnnnnnnnnnnnnnnnnnnnnnnnnnnnnnnnnnnnnnnnnnnnnnnnnnnnnnnnnnnnnnnnnnnnnnnnnnnnnnnnnnnnnnnnnnnnnnnnnnnnnnnnnnnnnnnnnnnnnnnnnnnnnnnnnnnnnnnnnnnnnnnnnnnnnnnnnnnnnnnnnnnnnnnnnnnnnnnnnnnnnnnnnnnnnnnnnnnnnnnnnnnnnnnnnnnnnnnnnnnnnnnnnnnnnnnnnnnnnnnnnnnnnnnnnnnnnnnnnnnnnnnnnnnnnnnnnnnnnnnnnnnnnnnnnnnnnnnnnnnnnnnnnnnnnnnnnnnnnnnnnnnnnnnnnnnnnnnnnnnnnnnnnnnnnnnnnnnnnnnnnnnnnnnnnnnnnnnnnnnnnnnnnnnnnnnnnnnnnnnnnnnnnnnnnnnnnnnnnnnnnnnnnnnnnnnnnnnnnnnnnnnnnnnnnnnnnnnnnnnnnnnnnnnnnnnnnnnnnnnnnnnnnnnnnnnnnnnnnnnnnnnnnnnnnnnnnnnnnnnnnnnnnnnnnnnnnnnnnnnnnnnnnnnnnnnnnnnnnnnnnnnnnnnnnnnnnnnnnnnnnnnnnnnnnnnnnnnnnnnnnnnnnnnnnnnnnnnnnnnnnnnnnnnnnnnnnnnnnnnnnnnnnnnnnnnnnnnnnnnnnnnnnnnnnnnnnnnnnnnnnnnnnnnnnnnnnnnnnnnnnnnnnnnnnnnnnnnnnnnnnnnnnnnnnnnnnnnnnnnnnnnnnnnnnnnnnnnnnnnnnnnnnnnnnnnnnnnnnnnnnnnnnnnnnnnnnnnnnnnnnnnnnnnnnnnnnnnnnnnnnnnnnnnnnnnnnnnnnnnnnnnnnnnnnnnnnnnnnnnnnnnnnnnnnnnnnnnnnnnnnnnnnnnnnnnnnnnnnnnnnnnnnnnnnnnnnnnnnnnnnnnnnnnnnnnnnnnnnnnnnnnnnnnnnnnnnnnnnnnnnnnnnnnnnnnnnnnnnnnnnnnnnnnnnnnnnnnnnnnnnnnnnnnnnnnnnnnnnnnnnnnnnnnnnnnnnnnnnnnnnnnnnnnnnnnnnnnnnnnnnnnnnnnnnnnnnnnnnnnnnnnnnnnnnnnnnnnnnnnnnnnnnnnnnnnnnnnnnnnnnnnnnnnnnnnnnnnnnnnnnnnnnnnnnnnnnnnnnnnnnnnnnnnnnnnnnnnnnnnnnnnnnnnnnnnnnnnnnnnnnnnnnnnnnnnnnnnnnnnnnnnnnnnnnnnnnnnnnnnnnnnnnnnnnnnnnnnnnnnnnnnnnnnnnnnnnnnnnnnnnnnnnnnnnnnnnnnnnnnnnnnnnnnnnnnnnnnnnnnnnnnnnnnnnnnnnnnnnnnnnnnnnnnnnnnnnnnnnnnnnnnnnnnnnnnnnnnnnnnnnnnnnnnnnnnnnnnnnnnnnnnnnnnnnnnnnnnnnnnnnnnnnnnnnnnnnnnnnnnnnnnnnnnnnnnnnnnnnnnnnnnnnnnnnnnnnnnnnnnnnnnnnnnnnnnnnnnnnnnnnnnnnnnnnnnnnnnnnnnnnnnnnnnnnnnnnnnnnnnnnnnnnnnnnnnnnnnnnnnnnnnnnnnnnnnnnnnnnnnnnnnnnnnnnnnnnnnnnnnnnnnnnnnnnnnnnnnnnnnnnnnnnnnnnnnnnnnnnnnnnnnnnnnnnnnnnnnnnnnnnnnnnnnnnnnnnnnnnnnnnnnnnnnnnnnnnnnnnnnnnnnnnnnnnnnnnnnnnnnnnnnnnnnnnnnnnnnnnnnnnnnnnnnnnnnnnnnnnnnnnnnnnnnnnnnnnnnnnnnnnnnnnnnnnnnnnnnnnnnnnnnnnnnnnnnnnnnnnnnnnnnnnnnnnnnnnnnnnnnnnnnnnnnnnnnnnnnnnnnnnnnnnnnnnnnnnnnnnnnnnnnnnnnnnnnnnnnnnnnnnnnnnnnnnnnnnnnnnnnnnnnnnnnnnnnnnnnnnnnnnnnnnnnnnnnnnnnnnnnnnnnnnnnnnnnnnnnnnnnnnnnnnnnnnnnnnnnnnnnnnnnnnnnnnnnnnnnnnnnnnnnnnnnnnnnnnnnnnnnnnnnnnnnnnnnnnnnnnnnnnnnnnnnnnnnnnnnnnnnnnnnnnnnnnnnnnnnnnnnnnnnnnnnnnnnnnnnnnnnnnnnnnnnnnnnnnnnnnnnnnnnnnnnnnnnnnnnnnnnnnnnnnnnnnnnnnnnnnnnnnnnnnnnnnnnnnnnnnnnnnnnnnnnnnnnnnnnnnnnnnnnnnnnnnnnnnnnnnnnnnnnnnnnnnnnnnnnnnnnnnnnnnnnnnnnnnnnnnnnnnnnnnnnnnnnnnnnnnnnnnnnnnnnnnnnnnnnnnnnnnnnnnnnnnnnnnnnnnnnnnnnnnnnnnnnnnnnnnnnnnnnnnnnnnnnnnnnnnnnnnnnnnnnnnnnnnnnnnnnnnnnnnnnnnnnnnnnnnnnnnnnnnnnnnnnnnnnnnnnnnnnnnnnnnnnnnnnnnnnnnnnnnnnnnnnnnnnnnnnnnnnnnnnnnnnnnnnnnnnnnnnnnnnnnnnnnnnnnnnnnnnnnnnnnnnnnnnnnnnnnnnnnnnnnnnnnnnnnnnnnnnnnnnnnnnnnnnnnnnnnnnnnnnnnnnnnnnnnnnnnnnnnnnnnnnnnnnnnnnnnnnnnnnnnnnnnnnnnnnnnnnnnnnnnnnnnnnnnnnnnnnnnnnnnnnnnnnnnnnnnnnnnnnnnnnnnnnnnnnnnnnnnnnnnnnnnnnnnnnnnnnnnnnnnnnnnnnnnnnnnnnnnnnnnnnnnnnnnnnnnnnnnnnnnnnnnnnnnnnnnnnnnnnnnnnnnnnnnnnnnnnnnnnnnnnnnnnnnnnnnnnnnnnnnnnnnnnnnnnnnnnnnnnnnnnnnnnnnnnnnnnnnnnnnnnnnnnnnnnnnnnnnnnnnnnnnnnnnnnnnnnnnnnnnnnnnnnnnnnnnnnnnnnnnnnnnnnnnnnnnnnnnnnnnnnnnnnnnnnnnnnnnnnnnnnnnnnnnnnnnnnnnnnnnnnnnnnnnnnnnnnnnnnnnnnnnnnnnnnnnnnnnnnnnnnnnnnnnnnnnnnnnnnnnnnnnnnnnnnnnnnnnnnnnnnnnnnnnnnnnnnnnnnnnnnnnnnnnnnnnnnnnnnnnnnnnnnnnnnnnnnnnnnnnnnnnnnnnnnnnnnnnnnnnnnnnnnnnnnnnnnnnnnnnnnnnnnnnnnnnnnnnnnnnnnnnnnnnnnnnnnnnnnnnnnnnnnnnnnnnnnnnnnnnnnnnnnnnnnnnnnnnnnnnnnnnnnnnnnnnnnnnnnnnnnnnnnnnnnnnnnnnnnnnnnnnnnnnnnnnnnnnnnnnnnnnnnnnnnnnnnnnnnnnnnnnnnnnnnnnnnnnnnnnnnnnnnnnnnnnnnnnnnnnnnnnnnnnnnnnnnnnnnnnnnnnnnnnnnnnnnnnnnnnnnnnnnnnnnnnnnnnnnnnnnnnnnnnnnnnnnnnnnnnnnnnnnnnnnnnnnnnnnnnnnnnnnnnnnnnnnnnnnnnnnnnnnnnnnnnnnnnnnnnnnnnnnnnnnnnnnnnnnnnnnnnnnnnnnnnnnnnnnnnnnnnnnnnnnnnnnnnnnnnnnnnnnnnnnnnnnnnnnnnnnnnnnnnnnnnnnnnnnnnnnnnnnnnnnnnnnnnnnnnnnnnnnnnnnnnnnnnnnnnnnnnnnnnnnnnnnnnnnnnnnnnnnnnnnnnnnnnnnnnnnnnnnnnnnnnnnnnnnnnnnnnnnnnnnnnnnnnnnnnnnnnnnnnnnnnnnnnnnnnnnnnnnnnnnnnnnnnnnnnnnnnnnnnnnnnnnnnnnnnnnnnnnnnnnnnnnnnnnnnnnnnnnnnnnnnnnnnnnnnnnnnnnnnnnnnnnnnnnnnnnnnnnnnnnnnnnnnnnnnnnnnnnnnnnnnnnnnnnnnnnnnnnnnnnnnnnnnnnnnnnnnnnnnnnnnnnnnnnnnnnnnnnnnnnnnnnnnnnnnnnnnnnnnnnnnnnnnnnnnnnnnnnnnnnnnnnnnnnnnnnnnnnnnnnnnnnnnnnnnnnnnnnnnnnnnnnnnnnnnnnnnnnnnnnnnnnnnnnnnnnnnnnnnnnnnnnnnnnnnnnnnnnnnnnnnnnnnnnnnnnnnnnnnnnnnnnnnnnnnnnnnnnnnnnnnnnnnnnnnnnnnnnnnnnnnnnnnnnnnnnnnnnnnnnnnnnnnnnnnnnnnnnnnnnnnnnnnnnnnnnnnnnnnnnnnnnnnnnnnnnnnnnnnnnnnnnnnnnnnnnnnnnnnnnnnnnnnnnnnnnnnnnnnnnnnnnnnnnnnnnnnnnnnnnnnnnnnnnnnnnnnnnnnnnnnnnnnnnnnnnnnnnnnnnnnnnnnnnnnnnnnnnnnnnnnnnnnnnnnnnnnnnnnnnnnnnnnnnnnnnnnnnnnnnnnnnnnnnnnnnnnnnnnnnnnnnnnnnnnnnnnnnnnnnnnnnnnnnnnnnnnnnnnnnnnnnnnnnnnnnnnnnnnnnnnnnnnnnnnnnnnnnnnnnnnnnnnnnnnnnnnnnnnnnnnnnnnnnnnnnnnnnnnnnnnnnnnnnnnnnnnnnnnnnnnnnnnnnnnnnnnnnnnnnnnnnnnnnnnnnnnnnnnnnnnnnnnnnnnnnnnnnnnnnnnnnnnnnnnnnnnnnnnnnnnnnnnnnnnnnnnnnnnnnnnnnnnnnnnnnnnnnnnnnnnnnnnnnnnnnnnnnnnnnnnnnnnnnnnnnnnnnnnnnnnnnnnnnnnnnnnnnnnnnnnnnnnnnnnnnnnnnnnnnnnnnnnnnnnnnnnnnnnnnnnnnnnnnnnnnnnnnnnnnnnnnnnnnnnnnnnnnnnnnnnnnnnnnnnnnnnnnnnnnnnnnnnnnnnnnnnnnnnnnnnnnnnnnnnnnnnnnnnnnnnnnnnnnnnnnnnnnnnnnnnnnnnnnnnnnnnnnnnnnnnnnnnnnnnnnnnnnnnnnnnnnnnnnnnnnnnnnnnnnnnnnnnnnnnnnnnnnnnnnnnnnnnnnnnnnnnnnnnnnnnnnnnnnnnnnnnnnnnnnnnnnnnnnnnnnnnnnnnnnnnnnnnnnnnnnnnnnnnnnnnnnnnnnnnnnnnnnnnnnnnnnnnnnnnnnnnnnnnnnnnnnnnnnnnnnnnnnnnnnnnnnnnnnnnnnnnnnnnnnnnnnnnnnnnnnnnnnnnnnnnnnnnnnnnnnnnnnnnnnnnnnnnnnnnnnnnnnnnnnnnnnnnnnnnnnnnnnnnnnnnnnnnnnnnnnnnnnnnnnnnnnnnnnnnnnnnnnnnnnnnnnnnnnnnnnnnnnnnnnnnnnnnnnnnnnnnnnnnnnnnnnnnnnnnnnnnnnnnnnnnnnnnnnnnnnnnnnnnnnnnnnnnnnnnnnnnnnnnnnnnnnnnnnnnnnnnnnnnnnnnnnnnnnnnnnnnnnnnnnnnnnnnnnnnnnnnnnnnnnnnnnnnnnnnnnnnnnnnnnnnnnnnnnnnnnnnnnnnnnnnnnnnnnnnnnnnnnnnnnnnnnnnnnnnnnnnnnnnnnnnnnnnnnnnnnnnnnnnnnnnnnnnnnnnnnnnnnnnnnnnnnnnnnnnnnnnnnnnnnnnnnnnnnnnnnnnnnnnnnnnnnnnnnnnnnnnnnnnnnnnnnnnnnnnnnnnnnnnnnnnnnnnnnnnnnnnnnnnnnnnnnnnnnnnnnnnnnnnnnnnnnnnnnnnnnnnnnnnnnnnnnnnnnnnnnnnnnnnnnnnnnnnnnnnnnnnnnnnnnnnnnnnnnnnnnnnnnnnnnnnnnnnnnnnnnnnnnnnnnnnnnnnnnnnnnnnnnnnnnnnnnnnnnnnnnnnnnnnnnnnnnnnnnnnnnnnnnnnnnnnnnnnnnnnnnnnnnnnnnnnnnnnnnnnnnnnnnnnnnnnnnnnnnnnnnnnnnnnnnnnnnnnnnnnnnnnnnnnnnnnnnnnnnnnnnnnnnnnnnnnnnnnnnnnnnnnnnnnnnnnnnnnnnnnnnnnnnnnnnnnnnnnnnnnnnnnnnnnnnnnnnnnnnnnnnnnnnnnnnnnnnnnnnnnnnnnnnnnnnnnnnnnnnnnnnnnnnnnnnnnnnnnnnnnnnnnnnnnnnnnnnnnnnnnnnnnnnnnnnnnnnnnnnnnnnnnnnnnnnnnnnnnnnnnnnnnnnnnnnnnnnnnnnnnnnnnnnnnnnnnnnnnnnnnnnnnnnnnnnnnnnnnnnnnnnnnnnnnnnnnnnnnnnnnnnnnnnnnnnnnnnnnnnnnnnnnnnnnnnnnnnnnnnnnnnnnnnnnnnnnnnnnnnnnnnnnnnnnnnnnnnnnnnnnnnnnnnnnnnnnnnnnnnnnnnnnnnnnnnnnnnnnnnnnnnnnnnnnnnnnnnnnnnnnnnnnnnnnnnnnnnnnnnnnnnnnnnnnnnnnnnnnnnnnnnnnnnnnnnnnnnnnnnnnnnnnnnnnnnnnnnnnnnnnnnnnnnnnnnnnnnnnnnnnnnnnnnnnnnnnnnnnnnnnnnnnnnnnnnnnnnnnnnnnnnnnnnnnnnnnnnnnnnnnnnnnnnnnnnnnnnnnnnnnnnnnnnnnnnnnnnnnnnnnnnnnnnnnnnnnnnnnnnnnnnnnnnnnnnnnnnnnnnnnnnnnnnnnnnnnnnnnnnnnnnnnnnnnnnnnnnnnnnnnnnnnnnnnnnnnnnnnnnnnnnnnnnnnnnnnnnnnnnnnnnnnnnnnnnnnnnnnnnnnnnnnnnnnnnnnnnnnnnnnnnnnnnnnnnnnnnnnnnnnnnnnnnnnnnnnnnnnnnnnnnnnnnnnnnnnnnnnnnnnnnnnnnnnnnnnnnnnnnnnnnnnnnnnnnnnnnnnnnnnnnnnnnnnnnnnnnnnnnnnnnnnnnnnnnnnnnnnnnnnnnnnnnnnnnnnnnnnnnnnnnnnnnnnnnnnnnnnnnnnnnnnnnnnnnnnnnnnnnnnnnnnnnnnnnnnnnnnnnnnnnnnnnnnnnnnnnnnnnnnnnnnnnnnnnnnnnnnnnnnnnnnnnnnnnnnnnnnnnnnnnnnnnnnnnnnnnnnnnnnnnnnnnnnnnnnnnnnnnnnnnnnnnnnnnnnnnnnnnnnnnnnnnnnnnnnnnnnnnnnnnnnnnnnnnnnnnnnnnnnnnnnnnnnnnnnnnnnnnnnnnnnnnnnnnnnnnnnnnnnnnnnnnnnnnnnnnnnnnnnnnnnnnnnnnnnnnnnnnnnnnnnnnnnnnnnnnnnnnnnnnnnnnnnnnnnnnnnnnnnnnnnnnnnnnnnnnnnnnnnnnnnnnnnnnnnnnnnnnnnnnnnnnnnnnnnnnnnnnnnnnnnnnnnnnnnnnnnnnnnnnnnnnnnnnnnnnnnnnnnnnnnnnnnnnnnnnnnnnnnnnnnnnnnnnnnnnnnnnnnnnnnnnnnnnnnnnnnnnnnnnnnnnnnnnnnnnnnnnnnnnnnnnnnnnnnnnnnnnnnnnnnnnnnnnnnnnnnnnnnnnnnnnnnnnnnnnnnnnnnnnnnnnnnnnnnnnnnnnnnnnnnnnnnnnnnnnnnnnnnnnnnnnnnnnnnnnnnnnnnnnnnnnnnnnnnnnnnnnnnnnnnnnnnnnnnnnnnnnnnnnnnnnnnnnnnnnnnnnnnnnnnnnnnnnnnnnnnnnnnnnnnnnnnnnnnnnnnnnnnnnnnnnnnnnnnnnnnnnnnnnnnnnnnnnnnnnnnnnnnnnnnnnnnnnnnnnnnnnnnnnnnnnnnnnnnnnnnnnnnnnnnnnnnnnnnnnnnnnnnnnnnnnnnnnnnnnnnnnnnnnnnnnnnnnnnnnnnnnnnnnnnnnnnnnnnnnnnnnnnnnnnnnnnnnnnnnnnnnnnnnnnnnnnnnnnnnnnnnnnnnnnnnnnnnnnnnnnnnnnnnnnnnnnnnnnnnnnnnnnnnnnnnnnnnnnnnnnnnnnnnnnnnnnnnnnnnnnnnnnnnnnnnnnnnnnnnnnnnnnnnnnnnnnnnnnnnnnnnnnnnnnnnnnnnnnnnnnnnnnnnnnnnnnnnnnnnnnnnnnnnnnnnnnnnnnnnnnnnnnnnnnnnnnnnnnnnnnnnnnnnnnnnnnnnnnnnnnnnnnnnnnnnnnnnnnnnnnnnnnnnnnnnnnnnnnnnnnnnnnnnnnnnnnnnnnnnnnnnnnnnnnnnnnnnnnnnnnnnnnnnnnnnnnnnnnnnnnnnnnnnnnnnnnnnnnnnnnnnnnnnnnnnnnnnnnnnnnnnnnnnnnnnnnnnnnnnnnnnnnnnnnnnnnnnnnnnnnnnnnnnnnnnnnnnnnnnnnnnnnnnnnnnnnnnnnnnnnnnnnnnnnnnnnnnnnnnnnnnnnnnnnnnnnnnnnnnnnnnnnnnnnnnnnnnnnnnnnnnnnnnnnnnnnnnnnnnnnnnnnnnnnnnnnnnnnnnnnnnnnnnnnnnnnnnnnnnnnnnnnnnnnnnnnnnnnnnnnnnnnnnnnnnnnnnnnnnnnnnnnnnnnnnnnnnnnnnnnnnnnnnnnnnnnnnnnnnnnnnnnnnnnnnnnnnnnnnnnnnnnnnnnnnnnnnnnnnnnnnnnnnnnnnnnnnnnnnnnnnnnnnnnnnnnnnnnnnnnnnnnnnnnnnnnnnnnnnnnnnnnnnnnnnnnnnnnnnnnnnnnnnnnnnnnnnnnnnnnnnnnnnnnnnnnnnnnnnnnnnnnnnnnnnnnnnnnnnnnnnnnnnnnnnnnnnnnnnnnnnnnnnnnnnnnnnnnnnnnnnnnnnnnnnnnnnnnnnnnnnnnnnnnnnnnnnnnnnnnnnnnnnnnnnnnnnnnnnnnnnnnnnnnnnnnnnnnnnnnnnnnnnnnnnnnnnnnnnnnnnnnnnnnnnnnnnnnnnnnnnnnnnnnnnnnnnnnnnnnnnnnnnnnnnnnnnnnnnnnnnnnnnnnnnnnnnnnnnnnnnnnnnnnnnnnnnnnnnnnnnnnnnnnnnnnnnnnnnnnnnnnnnnnnnnnnnnnnnnnnnnnnnnnnnnnnnnnnnnnnnnnnnnnnnnnnnnnnnnnnnnnnnnnnnnnnnnnnnnnnnnnnnnnnnnnnnnnnnnnnnnnnnnnnnnnnnnnnnnnnnnnnnnnnnnnnnnnnnnnnnnnnnnnnnnnnnnnnnnnnnnnnnnnnnnnnnnnnnnnnnnnnnnnnnnnnnnnnnnnnnnnnnnnnnnnnnnnnnnnnnnnnnnnnnnnnnnnnnnnnnnnnnnnnnnnnnnnnnnnnnnnnnnnnnnnnnnnnnnnnnnnnnnnnnnnnnnnnnnnnnnnnnnnnnnnnnnnnnnnnnnnnnnnnnnnnnnnnnnnnnnnnnnnnnnnnnnnnnnnnnnnnnnnnnnnnnnnnnnnnnnnnnnnnnnnnnnnnnnnnnnnnnnnnnnnnnnnnnnnnnnnnnnnnnnnnnnnnnnnnnnnnnnnnnnnnnnnnnnnnnnnnnnnnnnnnnnnnnnnnnnnnnnnnnnnnnnnnnnnnnnnnnnnnnnnnnnnnnnnnnnnnnnnnnnnnnnnnnnnnnnnnnnnnnnnnnnnnnnnnnnnnnnnnnnnnnnnnnnnnnnnnnnnnnnnnnnnnnnnnnnnnnnnnnnnnnnnnnnnnnnnnnnnnnnnnnnnnnnnnnnnnnnnnnnnnnnnnnnnnnnnnnnnnnnnnnnnnnnnnnnnnnnnnnnnnnnnnnnnnnnnnnnnnnnnnnnnnnnnnnnnnnnnnnnnnnnnnnnnnnnnnnnnnnnnnnnnnnnnnnnnnnnnnnnnnnnnnnnnnnnnnnnnnnnnnnnnnnnnnnnnnnnnnnnnnnnnnnnnnnnnnnnnnnnnnnnnnnnnnnnnnnnnnnnnnnnnnnnnnnnnnnnnnnnnnnnnnnnnnnnnnnnnnnnnnnnnnnnnnnnnnnnnnnnnnnnnnnnnnnnnnnnnnnnnnnnnnnnnnnnnnnnnnnnnnnnnnnnnnnnnnnnnnnnnnnnnnnnnnnnnnnnnnnnnnnnnnnnnnnnnnnnnnnnnnnnnnnnnnnnnnnnnnnnnnnnnnnnnnnnnnnnnnnnnnnnnnnnnnnnnnnnnnnnnnnnnnnnnnnnnnnnnnnnnnnnnnnnnnnnnnnnnnnnnnnnnnnnnnnnnnnnnnnnnnnnnnnnnnnnnnnnnnnnnnnnnnnnnnnnnnnnnnnnnnnnnnnnnnnnnnnnnnnnnnnnnnnnnnnnnnnnnnnnnnnnnnnnnnnnnnnnnnnnnnnnnnnnnnnnnnnnnnnnnnnnnnnnnnnnnnnnnnnnnnnnnnnnnnnnnnnnnnnnnnnnnnnnnnnnnnnnnnnnnnnnnnnnnnnnnnnnnnnnnnnnnnnnnnnnnnnnnnnnnnnnnnnnnnnnnnnnnnnnnnnnnnnnnnnnnnnnnnnnnnnnnnnnnnnnnnnnnnnnnnnnnnnnnnnnnnnnnnnnnnnnnnnnnnnnnnnnnnnnnnnnnnnnnnnnnnnnnnnnnnnnnnnnnnnnnnnnnnnnnnnnnnnnnnnnnnnnnnnnnnnnnnnnnnnnnnnnnnnnnnnnnnnnnnnnnnnnnnnnnnnnnnnnnnnnnnnnnnnnnnnnnnnnnnnnnnnnnnnnnnnnnnnnnnnnnnnnnnnnnnnnnnnnnnnnnnnnnnnnnnnnnnnnnnnnnnnnnnnnnnnnnnnnnnnnnnnnnnnnnnnnnnnnnnnnnnnnnnnnnnnnnnnnnnnnnnnnnnnnnnnnnnnnnnnnnnnnnnnnnnnnnnnnnnnnnnnnnnnnnnnnnnnnnnnnnnnnnnnnnnnnnnnnnnnnnnnnnnnnnnnnnnnnnnnnnnnnnnnnnnnnnnnnnnnnnnnnnnnnnnnnnnnnnnnnnnnnnnnnnnnnnnnnnnnnnnnnnnnnnnnnnnnnnnnnnnnnnnnnnnnnnnnnnnnnnnnnnnnnnnnnnnnnnnnnnnnnnnnnnnnnnnnnnnnnnnnnnnnnnnnnnnnnnnnnnnnnnnnnnnnnnnnnnnnnnnnnnnnnnnnnnnnnnnnnnnnnnnnnnnnnnnnnnnnnnnnnnnnnnnnnnnnnnnnnnnnnnnnnnnnnnnnnnnnnnnnnnnnnnnnnnnnnnnnnnnnnnnnnnnnnnnnnnnnnnnnnnnnnnnnnnnnnnnnnnnnnnnnnnnnnnnnnnnnnnnnnnnnnnnnnnnnnnnnnnnnnnnnnnnnnnnnnnnnnnnnnnnnnnnnnnnnnnnnnnnnnnnnnnnnnnnnnnnnnnnnnnnnnnnnnnnnnnnnnnnnnnnnnnnnnnnnnnnnnnnnnnnnnnnnnnnnnnnnnnnnnnnnnnnnnnnnnnnnnnnnnnnnnnnnnnnnnnnnnnnnnnnnnnnnnnnnnnnnnnnnnnnnnnnnnnnnnnnnnnnnnnnnnnnnnnnnnnnnnnnnnnnnnnnnnnnnnnnnnnnnnnnnnnnnnnnnnnnnnnnnnnnnnnnnnnnnnnnnnnnnnnnnnnnnnnnnnnnnnnnnnnnnnnnnnnnnnnnnnnnnnnnnnnnnnnnnnnnnnnnnnnnnnnnnnnnnnnnnnnnnnnnnnnnnnnnnnnnnnnnnnnnnnnnnnnnnnnnnnnnnnnnnnnnnnnnnnnnnnnnnnnnnnnnnnnnnnnnnnnnnnnnnnnnnnnnnnnnnnnnnnnnnnnnnnnnnnnnnnnnnnnnnnnnnnnnnnnnnnnnnnnnnnnnnnnnnnnnnnnnnnnnnnnnnnnnnnnnnnnnnnnnnnnnnnnnnnnnnnnnnnnnnnnnnnnnnnnnnnnnnnnnnnnnnnnnnnnnnnnnnnnnnnnnnnnnnnnnnnnnnnnnnnnnnnnnnnnnnnnnnnnnnnnnnnnnnnnnnnnnnnnnnnnnnnnnnnnnnnnnnnnnnnnnnnnnnnnnnnnnnnnnnnnnnnnnnnnnnnnnnnnnnnnnnnnnnnnnnnnnnnnnnnnnnnnnnnnnnnnnnnnnnnnnnnnnnnnnnnnnnnnnnnnnnnnnnnnnnnnnnnnnnnnnnnnnnnnnnnnnnnnnnnnnnnnnnnnnnnnnnnnnnnnnnnnnnnnnnnnnnnnnnnnnnnnnnnnnnnnnnnnnnnnnnnnnnnnnnnnnnnnnnnnnnnnnnnnnnnnnnnnnnnnnnnnnnnnnnnnnnnnnnnnnnnnnnnnnnnnnnnnnnnnnnnnnnnnnnnnnnnnnnnnnnnnnnnnnnnnnnnnnnnnnnnnnnnnnnnnnnnnnnnnnnnnnnnnnnnnnnnnnnnnnnnnnnnnnnnnnnnnnnnnnnnnnnnnnnnnnnnnnnnnnnnnnnnnnnnnnnnnnnnnnnnnnnnnnnnnnnnnnnnnnnnnnnnnnnnnnnnnnnnnnnnnnnnnnnnnnnnnnnnnnnnnnnnnnnnnnnnnnnnnnnnnnnnnnnnnnnnnnnnnnnnnnnnnnnnnnnnnnnnnnnnnnnnnnnnnnnnnnnnnnnnnnnnnnnnnnnnnnnnnnnnnnnnnnnnnnnnnnnnnnnnnnnnnnnnnnnnnnnnnnnnnnnnnnnnnnnnnnnnnnnnnnnnnnnnnnnnnnnnnnnnnnnnnnnnnnnnnnnnnnnnnnnnnnnnnnnnnnnnnnnnnnnnnnnnnnnnnnnnnnnnnnnnnnnnnnnnnnnnnnnnnnnnnnnnnnnnnnnnnnnnnnnnnnnnnnnnnnnnnnnnnnnnnnnnnnnnnnnnnnnnnnnnnnnnnnnnnnnnnnnnnnnnnnnnnnnnnnnnnnnnnnnnnnnnnnnnnnnnnnnnnnnnnnnnnnnnnnnnnnnnnnnnnnnnnnnnnnnnnnnnnnnnnnnnnnnnnnnnnnnnnnnnnnnnnnnnnnnnnnnnnnnnnnnnnnnnnnnnnnnnnnnnnnnnnnnnnnnnnnnnnnnnnnnnnnnnnnnnnnnnnnnnnnnnnnnnnnnnnnnnnnnnnnnnnnnnnnnnnnnnnnnnnnnnnnnnnnnnnnnnnnnnnnnnnnnnnnnnnnnnnnnnnnnnnnnnnnnnnnnnnnnnnnnnnnnnnnnnnnnnnnnnnnnnnnnnnnnnnnnnnnnnnnnnnnnnnnnnnnnnnnnnnnnnnnnnnnnnnnnnnnnnnnnnnnnnnnnnnnnnnnnnnnnnnnnnnnnnnnnnnnnnnnnnnnnnnnnnnnnnnnnnnnnnnnnnnnnnnnnnnnnnnnnnnnnnnnnnnnnnnnnnnnnnnnnnnnnnnnnnnnnnnnnnnnnnnnnnnnnnnnnnnnnnnnnnnnnnnnnnnnnnnnnnnnnnnnnnnnnnnnnnnnnnnnnnnnnnnnnnnnnnnnnnnnnnnnnnnnnnnnnnnnnnnnnnnnnnnnnnnnnnnnnnnnnnnnnnnnnnnnnnnnnnnnnnnnnnnnnnnnnnnnnnnnnnnnnnnnnnnnnnnnnnnnnnnnnnnnnnnnnnnnnnnnnnnnnnnnnnnnnnnnnnnnnnnnnnnnnnnnnnnnnnnnnnnnnnnnnnnnnnnnnnnnnnnnnnnnnnnnnnnnnnnnnnnnnnnnnnnnnnnnnnnnnnnnnnnnnnnnnnnnnnnnnnnnnnnnnnnnnnnnnnnnnnnnnnnnnnnnnnnnnnnnnnnnnnnnnnnnnnnnnnnnnnnnnnnnnnnnnnnnnnnnnnnnnnnnnnnnnnnnnnnnnnnnnnnnnnnnnnnnnnnnnnnnnnnnnnnnnnnnnnnnnnnnnnnnnnnnnnnnnnnnnnnnnnnnnnnnnnnnnnnnnnnnnnnnnnnnnnnnnnnnnnnnnnnnnnnnnnnnnnnnnnnnnnnnnnnnnnnnnnnnnnnnnnnnnnnnnnnnnnnnnnnnnnnnnnnnnnnnnnnnnnnnnnnnnnnnnnnnnnnnnnnnnnnnnnnnnnnnnnnnnnnnnnnnnnnnnnnnnnnnnnnnnnnnnnnnnnnnnnnnnnnnnnnnnnnnnnnnnnnnnnnnnnnnnnnnnnnnnnnnnnnnnnnnnnnnnnnnnnnnnnnnnnnnnnnnnnnnnnnnnnnnnnnnnnnnnnnnnnnnnnnnnnnnnnnnnnnnnnnnnnnnnnnnnnnnnnnnnnnnnnnnnnnnnnnnnnnnnnnnnnnnnnnnnnnnnnnnnnnnnnnnnnnnnnnnnnnnnnnnnnnnnnnnnnnnnnnnnnnnnnnnnnnnnnnnnnnnnnnnnnnnnnnnnnnnnnnnnnnnnnnnnnnnnnnnnnnnnnnnnnnnnnnnnnnnnnnnnnnnnnnnnnnnnnnnnnnnnnnnnnnnnnnnnnnnnnnnnnnnnnnnnnnnnnnnnnnnnnnnnnnnnnnnnnnnnnnnnnnnnnnnnnnnnnnnnnnnnnnnnnnnnnnnnnnnnnnnnnnnnnnnnnnnnnnnnnnnnnnnnnnnnnnnnnnnnnnnnnnnnnnnnnnnnnnnnnnnnnnnnnnnnnnnnnnnnnnnnnnnnnnnnnnnnnnnnnnnnnnnnnnnnnnnnnnnnnnnnnnnnnnnnnnnnnnnnnnnnnnnnnnnnnnnnnnnnnnnnnnnnnnnnnnnnnnnnnnnnnnnnnnnnnnnnnnnnnnnnnnnnnnnnnnnnnnnnnnnnnnnnnnnnnnnnnnnnnnnnnnnnnnnnnnnnnnnnnnnnnnnnnnnnnnnnnnnnnnnnnnnnnnnnnnnnnnnnnnnnnnnnnnnnnnnnnnnnnnnnnnnnnnnnnnnnnnnnnnnnnnnnnnnnnnnnnnnnnnnnnnnnnnnnnnnnnnnnnnnnnnnnnnnnnnnnnnnnnnnnnnnnnnnnnnnnnnnnnnnnnnnnnnnnnnnnnnnnnnnnnnnnnnnnnnnnnnnnnnnnnnnnnnnnnnnnnnnnnnnnnnnnnnnnnnnnnnnnnnnnnnnnnnnnnnnnnnnnnnnnnnnnnnnnnnnnnnnnnnnnnnnnnnnnnnnnnnnnnnnnnnnnnnnnnnnnnnnnnnnnnnnnnnnnnnnnnnnnnnnnnnnnnnnnnnnnnnnnnnnnnnnnnnnnnnnnnnnnnnnnnnnnnnnnnnnnnnnnnnnnnnnnnnnnnnnnnnnnnnnnnnnnnnnnnnnnnnnnnnnnnnnnnnnnnnnnnnnnnnnnnnnnnnnnnnnnnnnnnnnnnnnnnnnnnnnnnnnnnnnnnnnnnnnnnnnnnnnnnnnnnnnnnnnnnnnnnnnnnnnnnnnnnnnnnnnnnnnnnnnnnnnnnnnnnnnnnnnnnnnnnnnnnnnnnnnnnnnnnnnnnnnnnnnnnnnnnnnnnnnnnnnnnnnnnnnnnnnnnnnnnnnnnnnnnnnnnnnnnnnnnnnnnnnnnnnnnnnnnnnnnnnnnnnnnnnnnnnnnnnnnnnnnnnnnnnnnnnnnnnnnnnnnnnnnnnnnnnnnnnnnnnnnnnnnnnnnnnnnnnnnnnnnnnnnnnnnnnnnnnnnnnnnnnnnnnnnnnnnnnnnnnnnnnnnnnnnnnnnnnnnnnnnnnnnnnnnnnnnnnnnnnnnnnnnnnnnnnnnnnnnnnnnnnnnnnnnnnnnnnnnnnnnnnnnnnnnnnnnnnnnnnnnnnnnnnnnnnnnnnnnnnnnnnnnnnnnnnnnnnnnnnnnnnnnnnnnnnnnnnnnnnnnnnnnnnnnnnnnnnnnnnnnnnnnnnnnnnnnnnnnnnnnnnnnnnnnnnnnnnnnnnnnnnnnnnnnnnnnnnnnnnnnnnnnnnnnnnnnnnnnnnnnnnnnnnnnnnnnnnnnnnnnnnnnnnnnnnnnnnnnnnnnnnnnnnnnnnnnnnnnnnnnnnnnnnnnnnnnnnnnnnnnnnnnnnnnnnnnnnnnnnnnnnnnnnnnnnnnnnnnnnnnnnnnnnnnnnnnnnnnnnnnnnnnnnnnnnnnnnnnnnnnnnnnnnnnnnnnnnnnnnnnnnnnnnnnnnnnnnnnnnnnnnnnnnnnnnnnnnnnnnnnnnnnnnnnnnnnnnnnnnnnnnnnnnnnnnnnnnnnnnnnnnnnnnnnnnnnnnnnnnnnnnnnnnnnnnnnnnnnnnnnnnnnnnnnnnnnnnnnnnnnnnnnnnnnnnnnnnnnnnnnnnnnnnnnnnnnnnnnnnnnnnnnnnnnnnnnnnnnnnnnnnnnnnnnnnnnnnnnnnnnnnnnnnnnnnnnnnnnnnnnnnnnnnnnnnnnnnnnnnnnnnnnnnnnnnnnnnnnnnnnnnnnnnnnnnnnnnnnnnnnnnnnnnnnnnnnnnnnnnnnnnnnnnnnnnnnnnnnnnnnnnnnnnnnnnnnnnnnnnnnnnnnnnnnnnnnnnnnnnnnnnnnnnnnnnnnnnnnnnnnnnnnnnnnnnnnnnnnnnnnnnnnnnnnnnnnnnnnnnnnnnnnnnnnnnnnnnnnnnnnnnnnnnnnnnnnnnnnnnnnnnnnnnnnnnnnnnnnnnnnnnnnnnnnnnnnnnnnnnnnnnnnnnnnnnnnnnnnnnnnnnnnnnnnnnnnnnnnnnnnnnnnnnnnnnnnnnnnnnnnnnnnnnnnnnnnnnnnnnnnnnnnnnnnnnnnnnnnnnnnnnnnnnnnnnnnnnnnnnnnnnnnnnnnnnnnnnnnnnnnnnnnnnnnnnnnnnnnnnnnnnnnnnnnnnnnnnnnnnnnnnnnnnnnnnnnnnnnnnnnnnnnnnnnnnnnnnnnnnnnnnnnnnnnnnnnnnnnnnnnnnnnnnnnnnnnnnnnnnnnnnnnnnnnnnnnnnnnnnnnnnnnnnnnnnnnnnnnnnnnnnnnnnnnnnnnnnnnnnnnnnnnnnnnnnnnnnnnnnnnnnnnnnnnnnnnnnnnnnnnnnnnnnnnnnnnnnnnnnnnnnnnnnnnnnnnnnnnnnnnnnnnnnnnnnnnnnnnnnnnnnnnnnnnnnnnnnnnnnnnnnnnnnnnnnnnnnnnnnnnnnnnnnnnnnnnnnnnnnnnnnnnnnnnnnnnnnnnnnnnnnnnnnnnnnnnnnnnnnnnnnnnnnnnnnnnnnnnnnnnnnnnnnnnnnnnnnnnnnnnnnnnnnnnnnnnnnnnnnnnnnnnnnnnnnnnnnnnnnnnnnnnnnnnnnnnnnnnnnnnnnnnnnnnnnnnnnnnnnnnnnnnnnnnnnnnnnnnnnnnnnnnnnnnnnnnnnnnnnnnnnnnnnnnnnnnnnnnnnnnnnnnnnnnnnnnnnnnnnnnnnnnnnnnnnnnnnnnnnnnnnnnnnnnnnnnnnnnnnnnnnnnnnnnnnnnnnnnnnnnnnnnnnnnnnnnnnnnnnnnnnnnnnnnnnnnnnnnnnnnnnnnnnnnnnnnnnnnnnnnnnnnnnnnnnnnnnnnnnnnnnnnnnnnnnnnnnnnnnnnnnnnnnnnnnnnnnnnnnnnnnnnnnnnnnnnnnnnnnnnnnnnnnnnnnnnnnnnnnnnnnnnnnnnnnnnnnnnnnnnnnnnnnnnnnnnnnnnnnnnnnnnnnnnnnnnnnnnnnnnnnnnnnnnnnnnnnnnnnnnnnnnnnnnnnnnnnnnnnnnnnnnnnnnnnnnnnnnnnnnnnnnnnnnnnnnnnnnnnnnnnnnnnnnnnnnnnnnnnnnnnnnnnnnnnnnnnnnnnnnnnnnnnnnnnnnnnnnnnnnnnnnnnnnnnnnnnnnnnnnnnnnnnnnnnnnnnnnnnnnnnnnnnnnnnnnnnnnnnnnnnnnnnnnnnnnnnnnnnnnnnnnnnnnnnnnnnnnnnnnnnnnnnnnnnnnnnnnnnnnnnnnnnnnnnnnnnnnnnnnnnnnnnnnnnnnnnnnnnnnnnnnnnnnnnnnnnnnnnnnnnnnnnnnnnnnnnnnnnnnnnnnnnnnnnnnnnnnnnnnnnnnnnnnnnnnnnnnnnnnnnnnnnnnnnnnnnnnnnnnnnnnnnnnnnnnnnnnnnnnnnnnnnnnnnnnnnnnnnnnnnnnnnnnnnnnnnnnnnnnnnnnnnnnnnnnnnnnnnnnnnnnnnnnnnnnnnnnnnnnnnnnnnnnnnnnnnnnnnnnnnnnnnnnnnnnnnnnnnnnnnnnnnnnnnnnnnnnnnnnnnnnnnnnnnnnnnnnnnnnnnnnnnnnnnnnnnnnnnnnnnnnnnnnnnnnnnnnnnnnnnnnnnnnnnnnnnnnnnnnnnnnnnnnnnnnnnnnnnnnnnnnnnnnnnnnnnnnnnnnnnnnnnnnnnnnnnnnnnnnnnnnnnnnnnnnnnnnnnnnnnnnnnnnnnnnnnnnnnnnnnnnnnnnnnnnnnnnnnnnnnnnnnnnnnnnnnnnnnnnnnnnnnnnnnnnnnnnnnnnnnnnnnnnnnnnnnnnnnnnnnnnnnnnnnnnnnnnnnnnnnnnnnnnnnnnnnnnnnnnnnnnnnnnnnnnnnnnnnnnnnnnnnnnnnnnnnnnnnnnnnnnnnnnnnnnnnnnnnnnnnnnnnnnnnnnnnnnnnnnnnnnnnnnnnnnnnnnnnnnnnnnnnnnnnnnnnnnnnnnnnnnnnnnnnnnnnnnnnnnnnnnnnnnnnnnnnnnnnnnnnnnnnnnnnnnnnnnnnnnnnnnnnnnnnnnnnnnnnnnnnnnnnnnnnnnnnnnnnnnnnnnnnnnnnnnnnnnnnnnnnnnnnnnnnnnnnnnnnnnnnnnnnnnnnnnnnnnnnnnnnnnnnnnnnnnnnnnnnnnnnnnnnnnnnnnnnnnnnnnnnnnnnnnnnnnnnnnnnnnnnnnnnnnnnnnnnnnnnnnnnnnnnnnnnnnnnnnnnnnnnnnnnnnnnnnnnnnnnnnnnnnnnnnnnnnnnnnnnnnnnnnnnnnnnnnnnnnnnnnnnnnnnnnnnnnnnnnnnnnnnnnnnnnnnnnnnnnnnnnnnnnnnnnnnnnnnnnnnnnnnnnnnnnnnnnnnnnnnnnnnnnnnnnnnnnnnnnnnnnnnnnnnnnnnnnnnnnnnnnnnnnnnnnnnnnnnnnnnnnnnnnnnnnnnnnnnnnnnnnnnnnnnnnnnnnnnnnnnnnnnnnnnnnnnnnnnnnnnnnnnnnnnnnnnnnnnnnnnnnnnnnnnnnnnnnnnnnnnnnnnnnnnnnnnnnnnnnnnnnnnnnnnnnnnnnnnnnnnnnnnnnnnnnnnnnnnnnnnnnnnnnnnnnnnnnnnnnnnnnnnnnnnnnnnnnnnnnnnnnnnnnnnnnnnnnnnnnnnnnnnnnnnnnnnnnnnnnnnnnnnnnnnnnnnnnnnnnnnnnnnnnnnnnnnnnnnnnnnnnnnnnnnnnnnnnnnnnnnnnnnnnnnnnnnnnnnnnnnnnnnnnnnnnnnnnnnnnnnnnnnnnnnnnnnnnnnnnnnnnnnnnnnnnnnnnnnnnnnnnnnnnnnnnnnnnnnnnnnnnnnnnnnnnnnnnnnnnnnnnnnnnnnnnnnnnnnnnnnnnnnnnnnnnnnnnnnnnnnnnnnnnnnnnnnnnnnnnnnnnnnnnnnnnnnnnnnnnnnnnnnnnnnnnnnnnnnnnnnnnnnnnnnnnnnnnnnnnnnnnnnnnnnnnnnnnnnnnnnnnnnnnnnnnnnnnnnnnnnnnnnnnnnnnnnnnnnnnnnnnnnnnnnnnnnnnnnnnnnnnnnnnnnnnnnnnnnnnnnnnnnnnnnnnnnnnnnnnnnnnnnnnnnnnnnnnnnnnnnnnnnnnnnnnnnnnnnnnnnnnnnnnnnnnnnnnnnnnnnnnnnnnnnnnnnnnnnnnnnnnnnnnnnnnnnnnnnnnnnnnnnnnnnnnnnnnnnnnnnnnnnnnnnnnnnnnnnnnnnnnnnnnnnnnnnnnnnnnnnnnnnnnnnnnnnnnnnnnnnnnnnnnnnnnnnnnnnnnnnnnnnnnnnnnnnnnnnnnnnnnnnnnnnnnnnnnnnnnnnnnnnnnnnnnnnnnnnnnnnnnnnnnnnnnnnnnnnnnnnnnnnnnnnnnnnnnnnnnnnnnnnnnnnnnnnnnnnnnnnnnnnnnnnnnnnnnnnnnnnnnnnnnnnnnnnnnnnnnnnnnnnnnnnnnnnnnnnnnnnnnnnnnnnnnnnnnnnnnnnnnnnnnnnnnnnnnnnnnnnnnnnnnnnnnnnnnnnnnnnnnnnnnnnnnnnnnnnnnnnnnnnnnnnnnnnnnnnnnnnnnnnnnnnnnnnnnnnnnnnnnnnnnnnnnnnnnnnnnnnnnnnnnnnnnnnnnnnnnnnnnnnnnnnnnnnnnnnnnnnnnnnnnnnnnnnnnnnnnnnnnnnnnnnnnnnnnnnnnnnnnnnnnnnnnnnnnnnnnnnnnnnnnnnnnnnnnnnnnnnnnnnnnnnnnnnnnnnnnnnnnnnnnnnnnnnnnnnnnnnnnnnnnnnnnnnnnnnnnnnnnnnnnnnnnnnnnnnnnnnnnnnnnnnnnnnnnnnnnnnnnnnnnnnnnnnnnnnnnnnnnnnnnnnnnnnnnnnnnnnnnnnnnnnnnnnnnnnnnnnnnnnnnnnnnnnnnnnnnnnnnnnnnnnnnnnnnnnnnnnnnnnnnnnnnnnnnnnnnnnnnnnnnnnnnnnnnnnnnnnnnnnnnnnnnnnnnnnnnnnnnnnnnnnnnnnnnnnnnnnnnnnnnnnnnnnnnnnnnnnnnnnnnnnnnnnnnnnnnnnnnnnnnnnnnnnnnnnnnnnnnnnnnnnnnnnnnnnnnnnnnnnnnnnnnnnnnnnnnnnnnnnnnnnnnnnnnnnnnnnnnnnnnnnnnnnnnnnnnnnnnnnnnnnnnnnnnnnnnnnnnnnnnnnnnnnnnnnnnnnnnnnnnnnnnnnnnnnnnnnnnnnnnnnnnnnnnnnnnnnnnnnnnnnnnnnnnnnnnnnnnnnnnnnnnnnnnnnnnnnnnnnnnnnnnnnnnnnnnnnnnnnnnnnnnnnnnnnnnnnnnnnnnnnnnnnnnnnnnnnnnnnnnnnnnnnnnnnnnnnnnnnnnnnnnnnnnnnnnnnnnnnnnnnnnnnnnnnnnnnnnnnnnnnnnnnnnnnnnnnnnnnnnnnnnnnnnnnnnnnnnnnnnnnnnnnnnnnnnnnnnnnnnnnnnnnnnnnnnnnnnnnnnnnnnnnnnnnnnnnnnnnnnnnnnnnnnnnnnnnnnnnnnnnnnnnnnnnnnnnnnnnnnnnnnnnnnnnnnnnnnnnnnnnnnnnnnnnnnnnnnnnnnnnnnnnnnnnnnnnnnnnnnnnnnnnnnnnnnnnnnnnnnnnnnnnnnnnnnnnnnnnnnnnnnnnnnnnnnnnnnnnnnnnnnnnnnnnnnnnnnnnnnnnnnnnnnnnnnnnnnnnnnnnnnnnnnnnnnnnnnnnnnnnnnnnnnnnnnnnnnnnnnnnnnnnnnnnnnnnnnnnnnnnnnnnnnnnnnnnnnnnnnnnnnnnnnnnnnnnnnnnnnnnnnnnnnnnnnnnnnnnnnnnnnnnnnnnnnnnnnnnnnnnnnnnnnnnnnnnnnnnnnnnnnnnnnnnnnnnnnnnnnnnnnnnnnnnnnnnnnnnnnnnnnnnnnnnnnnnnnnnnnnnnnnnnnnnnnnnnnnnnnnnnnnnnnnnnnnnnnnnnnnnnnnnnnnnnnnnnnnnnnnnnnnnnnnnnnnnnnnnnnnnnnnnnnnnnnnnnnnnnnnnnnnnnnnnnnnnnnnnnnnnnnnnnnnnnnnnnnnnnnnnnnnnnnnnnnnnnnnnnnnnnnnnnnnnnnnnnnnnnnnnnnnnnnnnnnnnnnnnnnnnnnnnnnnnnnnnnnnnnnnnnnnnnnnnnnnnnnnnnnnnnnnnnnnnnnnnnnnnnnnnnnnnnnnnnnnnnnnnnnnnnnnnnnnnnnnnnnnnnnnnnnnnnnnnnnnnnnnnnnnnnnnnnnnnnnnnnnnnnnnnnnnnnnnnnnnnnnnnnnnnnnnnnnnnnnnnnnnnnnnnnnnnnnnnnnnnnnnnnnnnnnnnnnnnnnnnnnnnnnnnnnnnnnnnnnnnnnnnnnnnnnnnnnnnnnnnnnnnnnnnnnnnnnnnnnnnnnnnnnnnnnnnnnnnnnnnnnnnnnnnnnnnnnnnnnnnnnnnnnnnnnnnnnnnnnnnnnnnnnnnnnnnnnnnnnnnnnnnnnnnnnnnnnnnnnnnnnnnnnnnnnnnnnnnnnnnnnnnnnnnnnnnnnnnnnnnnnnnnnnnnnnnnnnnnnnnnnnnnnnnnnnnnnnnnnnnnnnnnnnnnnnnnnnnnnnnnnnnnnnnnnnnnnnnnnnnnnnnnnnnnnnnnnnnnnnnnnnnnnnnnnnnnnnnnnnnnnnnnnnnnnnnnnnnnnnnnnnnnnnnnnnnnnnnnnnnnnnnnnnnnnnnnnnnnnnnnnnnnnnnnnnnnnnnnnnnnnnnnnnnnnnnnnnnnnnnnnnnnnnnnnnnnnnnnnnnnnnnnnnnnnnnnnnnnnnnnnnnnnnnnnnnnnnnnnnnnnnnnnnnnnnnnnnnnnnnnnnnnnnnnnnnnnnnnnnnnnnnnnnnnnnnnnnnnnnnnnnnnnnnnnnnnnnnnnnnnnnnnnnnnnnnnnnnnnnnnnnnnnnnnnnnnnnnnnnnnnnnnnnnnnnnnnnnnnnnnnnnnnnnnnnnnnnnnnnnnnnnnnnnnnnnnnnnnnnnnnnnnnnnnnnnnnnnnnnnnnnnnnnnnnnnnnnnnnnnnnnnnnnnnnnnnnnnnnnnnnnnnnnnnnnnnnnnnnnnnnnnnnnnnnnnnnnnnnnnnnnnnnnnnnnnnnnnnnnnnnnnnnnnnnnnnnnnnnnnnnnnnnnnnnnnnnnnnnnnnnnnnnnnnnnnnnnnnnnnnnnnnnnnnnnnnnnnnnnnnnnnnnnnnnnnnnnnnnnnnnnnnnnnnnnnnnnnnnnnnnnnnnnnnnnnnnnnnnnnnnnnnnnnnnnnnnnnnnnnnnnnnnnnnnnnnnnnnnnnnnnnnnnnnnnnnnnnnnnnnnnnnnnnnnnnnnnnnnnnnnnnnnnnnnnnnnnnnnnnnnnnnnnnnnnnnnnnnnnnnnnnnnnnnnnnnnnnnnnnnnnnnnnnnnnnnnnnnnnnnnnnnnnnnnnnnnnnnnnnnnnnnnnnnnnnnnnnnnnnnnnnnnnnnnnnnnnnnnnnnnnnnnnnnnnnnnnnnnnnnnnnnnnnnnnnnnnnnnnnnnnnnnnnnnnnnnnnnnnnnnnnnnnnnnnnnnnnnnnnnnnnnnnnnnnnnnnnnnnnnnnnnnnnnnnnnnnnnnnnnnnnnnnnnnnnnnnnnnnnnnnnnnnnnnnnnnnnnnnnnnnnnnnnnnnnnnnnnnnnnnnnnnnnnnnnnnnnnnnnnnnnnnnnnnnnnnnnnnnnnnnnnnnnnnnnnnnnnnnnnnnnnnnnnnnnnnnnnnnnnnnnnnnnnnnnnnnnnnnnnnnnnnnnnnnnnnnnnnnnnnnnnnnnnnnnnnnnnnnnnnnnnnnnnnnnnnnnnnnnnnnnnnnnnnnnnnnnnnnnnnnnnnnnnnnnnnnnnnnnnnnnnnnnnnnnnnnnnnnnnnnnnnnnnnnnnnnnnnnnnnnnnnnnnnnnnnnnnnnnnnnnnnnnnnnnnnnnnnnnnnnnnnnnnnnnnnnnnnnnnnnnnnnnnnnnnnnnnnnnnnnnnnnnnnnnnnnnnnnnnnnnnnnnnnnnnnnnnnnnnnnnnnnnnnnnnnnnnnnnnnnnnnnnnnnnnnnnnnnnnnnnnnnnnnnnnnnnnnnnnnnnnnnnnnnnnnnnnnnnnnnnnnnnnnnnnnnnnnnnnnnnnnnnnnnnnnnnnnnnnnnnnnnnnnnnnnnnnnnnnnnnnnnnnnnnnnnnnnnnnnnnnnnnnnnnnnnnnnnnnnnnnnnnnnnnnnnnnnnnnnnnnnnnnnnnnnnnnnnnnnnnnnnnnnnnnnnnnnnnnnnnnnnnnnnnnnnnnnnnnnnnnnnnnnnnnnnnnnnnnnnnnnnnnnnnnnnnnnnnnnnnnnnnnnnnnnnnnnnnnnnnnnnnnnnnnnnnnnnnnnnnnnnnnnnnnnnnnnnnnnnnnnnnnnnnnnnnnnnnnnnnnnnnnnnnnnnnnnnnnnnnnnnnnnnnnnnnnnnnnnnnnnnnnnnnnnnnnnnnnnnnnnnnnnnnnnnnnnnnnnnnnnnnnnnnnnnnnnnnnnnnnnnnnnnnnnnnnnnnnnnnnnnnnnnnnnnnnnnnnnnnnnnnnnnnnnnnnnnnnnnnnnnnnnnnnnnnnnnnnnnnnnnnnnnnnnnnnnnnnnnnnnnnnnnnnnnnnnnnnnnnnnnnnnnnnnnnnnnnnnnnnnnnnnnnnnnnnnnnnnnnnnnnnnnnnnnnnnnnnnnnnnnnnnnnnnnnnnnnnnnnnnnnnnnnnnnnnnnnnnnnnnnnnnnnnnnnnnnnnnnnnnnnnnnnnnnnnnnnnnnnnnnnnnnnnnnnnnnnnnnnnnnnnnnnnnnnnnnnnnnnnnnnnnnnnnnnnnnnnnnnnnnnnnnnnnnnnnnnnnnnnnnnnnnnnnnnnnnnnnnnnnnnnnnnnnnnnnnnnnnnnnnnnnnnnnnnnnnnnnnnnnnnnnnnnnnnnnnnnnnnnnnnnnnnnnnnnnnnnnnnnnnnnnnnnnnnnnnnnnnnnnnnnnnnnnnnnnnnnnnnnnnnnnnnnnnnnnnnnnnnnnnnnnnnnnnnnnnnnnnnnnnnnnnnnnnnnnnnnnnnnnnnnnnnnnnnnnnnnnnnnnnnnnnnnnnnnnnnnnnnnnnnnnnnnnnnnnnnnnnnnnnnnnnnnnnnnnnnnnnnnnnnnnnnnnnnnnnnnnnnnnnnnnnnnnnnnnnnnnnnnnnnnnnnnnnnnnnnnnnnnnnnnnnnnnnnnnnnnnnnnnnnnnnnnnnnnnnnnnnnnnnnnnnnnnnnnnnnnnnnnnnnnnnnnnnnnnnnnnnnnnnnnnnnnnnnnnnnnnnnnnnnnnnnnnnnnnnnnnnnnnnnnnnnnnnnnnnnnnnnnnnnnnnnnnnnnnnnnnnnnnnnnnnnnnnnnnnnnnnnnnnnnnnnnnnnnnnnnnnnnnnnnnnnnnnnnnnnnnnnnnnnnnnnnnnnnnnnnnnnnnnnnnnnnnnnnnnnnnnnnnnnnnnnnnnnnnnnnnnnnnnnnnnnnnnnnnnnnnnnnnnnnnnnnnnnnnnnnnnnnnnnnnnnnnnnnnnnnnnnnnnnnnnnnnnnnnnnnnnnnnnnnnnnnnnnnnnnnnnnnnnnnnnnnnnnnnnnnnnnnnnnnnnnnnnnnnnnnnnnnnnnnnnnnnnnnnnnnnnnnnnnnnnnnnnnnnnnnnnnnnnnnnnnnnnnnnnnnnnnnnnnnnnnnnnnnnnnnnnnnnnnnnnnnnnnnnnnnnnnnnnnnnnnnnnnnnnnnnnnnnnnnnnnnnnnnnnnnnnnnnnnnnnnnnnnnnnnnnnnnnnnnnnnnnnnnnnnnnnnnnnnnnnnnnnnnnnnnnnnnnnnnnnnnnnnnnnnnnnnnnnnnnnnnnnnnnnnnnnnnnnnnnnnnnnnnnnnnnnnnnnnnnnnnnnnnnnnnnnnnnnnnnnnnnnnnnnnnnnnnnnnnnnnnnnnnnnnnnnnnnnnnnnnnnnnnnnnnnnnnnnnnnnnnnnnnnnnnnnnnnnnnnnnnnnnnnnnnnnnnnnnnnnnnnnnnnnnnnnnnnnnnnnnnnnnnnnnnnnnnnnnnnnnnnnnnnnnnnnnnnnnnnnnnnnnnnnnnnnnnnnnnnnnnnnnnnnnnnnnnnnnnnnnnnnnnnnnnnnnnnnnnnnnnnnnnnnnnnnnnnnnnnnnnnnnnnnnnnnnnnnnnnnnnnnnnnnnnnnnnnnnnnnnnnnnnnnnnnnnnnnnnnnnnnnnnnnnnnnnnnnnnnnnnnnnnnnnnnnnnnnnnnnnnnnnnnnnnnnnnnnnnnnnnnnnnnnnnnnnnnnnnnnnnnnnnnnnnnnnnnnnnnnnnnnnnnnnnnnnnnnnnnnnnnnnnnnnnnnnnnnnnnnnnnnnnnnnnnnnnnnnnnnnnnnnnnnnnnnnnnnnnnnnnnnnnnnnnnnnnnnnnnnnnnnnnnnnnnnnnnnnnnnnnnnnnnnnnnnnnnnnnnnnnnnnnnnnnnnnnnnnnnnnnnnnnnnnnnnnnnnnnnnnnnnnnnnnnnnnnnnnnnnnnnnnnnnnnnnnnnnnnnnnnnnnnnnnnnnnnnnnnnnnnnnnnnnnnnnnnnnnnnnnnnnnnnnnnnnnnnnnnnnnnnnnnnnnnnnnnnnnnnnnnnnnnnnnnnnnnnnnnnnnnnnnnnnnnnnnnnnnnnnnnnnnnnnnnnnnnnnnnnnnnnnnnnnnnnnnnnnnnnnnnnnnnnnnnnnnnnnnnnnnnnnnnnnnnnnnnnnnnnnnnnnnnnnnnnnnnnnnnnnnnnnnnnnnnnnnnnnnnnnnnnnnnnnnnnnnnnnnnnnnnnnnnnnnnnnnnnnnnnnnnnnnnnnnnnnnnnnnnnnnnnnnnnnnnnnnnnnnnnnnnnnnnnnnnnnnnnnnnnnnnnnnnnnnnnnnnnnnnnnnnnnnnnnnnnnnnnnnnnnnnnnnnnnnnnnnnnnnnnnnnnnnnnnnnnnnnnnnnnnnnnnnnnnnnnnnnnnnnnnnnnnnnnnnnnnnnnnnnnnnnnnnnnnnnnnnnnnnnnnnnnnnnnnnnnnnnnnnnnnnnnnnnnnnnnnnnnnnnnnnnnnnnnnnnnnnnnnnnnnnnnnnnnnnnnnnnnnnnnnnnnnnnnnnnnnnnnnnnnnnnnnnnnnnnnnnnnnnnnnnnnnnnnnnnnnnnnnnnnnnnnnnnnnnnnnnnnnnnnnnnnnnnnnnnnnnnnnnnnnnnnnnnnnnnnnnnnnnnnnnnnnnnnnnnnnnnnnnnnnnnnnnnnnnnnnnnnnnnnnnnnnnnnnnnnnnnnnnnnnnnnnnnnnnnnnnnnnnnnnnnnnnnnnnnnnnnnnnnnnnnnnnnnnnnnnnnnnnnnnnnnnnnnnnnnnnnnnnnnnnnnnnnnnnnnnnnnnnnnnnnnnnnnnnnnnnnnnnnnnnnnnnnnnnnnnnnnnnnnnnnnnnnnnnnnnnnnnnnnnnnnnnnnnnnnnnnnnnnnnnnnnnnnnnnnnnnnnnnnnnnnnnnnnnnnnnnnnnnnnnnnnnnnnnnnnnnnnnnnnnnnnnnnnnnnnnnnnnnnnnnnnnnnnnnnnnnnnnnnnnnnnnnnnnnnnnnnnnnnnnnnnnnnnnnnnnnnnnnnnnnnnnnnnnnnnnnnnnnnnnnnnnnnnnnnnnnnnnnnnnnnnnnnnnnnnnnnnnnnnnnnnnnnnnnnnnnnnnnnnnnnnnnnnnnnnnnnnnnnnnnnnnnnnnnnnnnnnnnnnnnnnnnnnnnnnnnnnnnnnnnnnnnnnnnnnnnnnnnnnnnnnnnnnnnnnnnnnnnnnnnnnnnnnnnnnnnnnnnnnnnnnnnnnnnnnnnnnnnnnnnnnnnnnnnnnnnnnnnnnnnnnnnnnnnnnnnnnnnnnnnnnnnnnnnnnnnnnnnnnnnnnnnnnnnnnnnnnnnnnnnnnnnnnnnnnnnnnnnnnnnnnnnnnnnnnnnnnnnnnnnnnnnnnnnnnnnnnnnnnnnnnnnnnnnnnnnnnnnnnnnnnnnnnnnnnnnnnnnnnnnnnnnnnnnnnnnnnnnnnnnnnnnnnnnnnnnnnnnnnnnnnnnnnnnnnnnnnnnnnnnnnnnnnnnnnnnnnnnnnnnnnnnnnnnnnnnnnnnnnnnnnnnnnnnnnnnnnnnnnnnnnnnnnnnnnnnnnnnnnnnnnnnnnnnnnnnnnnnnnnnnnnnnnnnnnnnnnnnnnnnnnnnnnnnnnnnnnnnnnnnnnnnnnnnnnnnnnnnnnnnnnnnnnnnnnnnnnnnnnnnnnnnnnnnnnnnnnnnnnnnnnnnnnnnnnnnnnnnnnnnnnnnnnnnnnnnnnnnnnnnnnnnnnnnnnnnnnnnnnnnnnnnnnnnnnnnnnnnnnnnnnnnnnnnnnnnnnnnnnnnnnnnnnnnnnnnnnnnnnnnnnnnnnnnnnnnnnnnnnnnnnnnnnnnnnnnnnnnnnnnnnnnnnnnnnnnnnnnnnnnnnnnnnnnnnnnnnnnnnnnnnnnnnnnnnnnnnnnnnnnnnnnnnnnnnnnnnnnnnnnnnnnnnnnnnnnnnnnnnnnnnnnnnnnnnnnnnnnnnnnnnnnnnnnnnnnnnnnnnnnnnnnnnnnnnnnnnnnnnnnnnnnnnnnnnnnnnnnnnnnnnnnnnnnnnnnnnnnnnnnnnnnnnnnnnnnnnnnnnnnnnnnnnnnnnnnnnnnnnnnnnnnnnnnnnnnnnnnnnnnnnnnnnnnnnnnnnnnnnnnnnnnnnnnnnnnnnnnnnnnnnnnnnnnnnnnnnnnnnnnnnnnnnnnnnnnnnnnnnnnnnnnnnnnnnnnnnnnnnnnnnnnnnnnnnnnnnnnnnnnnnnnnnnnnnnnnnnnnnnnnnnnnnnnnnnnnnnnnnnnnnnnnnnnnnnnnnnnnnnnnnnnnnnnnnnnnnnnnnnnnnnnnnnnnnnnnnnnnnnnnnnnnnnnnnnnnnnnnnnnnnnnnnnnnnnnnnnnnnnnnnnnnnnnnnnnnnnnnnnnnnnnnnnnnnnnnnnnnnnnnnnnnnnnnnnnnnnnnnnnnnnnnnnnnnnnnnnnnnnnnnnnnnnnnnnnnnnnnnnnnnnnnnnnnnnnnnnnnnnnnnnnnnnnnnnnnnnnnnnnnnnnnnnnnnnnnnnnnnnnnnnnnnnnnnnnnnnnnnnnnnnnnnnnnnnnnnnnnnnnnnnnnnnnnnnnnnnnnnnnnnnnnnnnnnnnnnnnnnnnnnnnnnnnnnnnnnnnnnnnnnnnnnnnnnnnnnnnnnnnnnnnnnnnnnnnnnnnnnnnnnnnnnnnnnnnnnnnnnnnnnnnnnnnnnnnnnnnnnnnnnnnnnnnnnnnnnnnnnnnnnnnnnnnnnnnnnnnnnnnnnnnnnnnnnnnnnnnnnnnnnnnnnnnnnnnnnnnnnnnnnnnnnnnnnnnnnnnnnnnnnnnnnnnnnnnnnnnnnnnnnnnnnnnnnnnnnnnnnnnnnnnnnnnnnnnnnnnnnnnnnnnnnnnnnnnnnnnnnnnnnnnnnnnnnnnnnnnnnnnnnnnnnnnnnnnnnnnnnnnnnnnnnnnnnnnnnnnnnnnnnnnnnnnnnnnnnnnnnnnnnnnnnnnnnnnnnnnnnnnnnnnnnnnnnnnnnnnnnnnnnnnnnnnnnnnnnnnnnnnnnnnnnnnnnnnnnnnnnnnnnnnnnnnnnnnnnnnnnnnnnnnnnnnnnnnnnnnnnnnnnnnnnnnnnnnnnnnnnnnnnnnnnnnnnnnnnnnnnnnnnnnnnnnnnnnnnnnnnnnnnnnnnnnnnnnnnnnnnnnnnnnnnnnnnnnnnnnnnnnnnnnnnnnnnnnnnnnnnnnnnnnnnnnnnnnnnnnnnnnnnnnnnnnnnnnnnnnnnnnnnnnnnnnnnnnnnnnnnnnnnnnnnnnnnnnnnnnnnnnnnnnnnnnnnnnnnnnnnnnnnnnnnnnnnnnnnnnnnnnnnnnnnnnnnnnnnnnnnnnnnnnnnnnnnnnnnnnnnnnnnnnnnnnnnnnnnnnnnnnnnnnnnnnnnnnnnnnnnnnnnnnnnnnnnnnnnnnnnnnnnnnnnnnnnnnnnnnnnnnnnnnnnnnnnnnnnnnnnnnnnnnnnnnnnnnnnnnnnnnnnnnnnnnnnnnnnnnnnnnnnnnnnnnnnnnnnnnnnnnnnnnnnnnnnnnnnnnnnnnnnnnnnnnnnnnnnnnnnnnnnnnnnnnnnnnnnnnnnnnnnnnnnnnnnnnnnnnnnnnnnnnnnnnnnnnnnnnnnnnnnnnnnnnnnnnnnnnnnnnnnnnnnnnnnnnnnnnnnnnnnnnnnnnnnnnnnnnnnnnnnnnnnnnnnnnnnnnnnnnnnnnnnnnnnnnnnnnnnnnnnnnnnnnnnnnnnnnnnnnnnnnnnnnnnnnnnnnnnnnnnnnnnnnnnnnnnnnnnnnnnnnnnnnnnnnnnnnnnnnnnnnnnnnnnnnnnnnnnnnnnnnnnnnnnnnnnnnnnnnnnnnnnnnnnnnnnnnnnnnnnnnnnnnnnnnnnnnnnnnnnnnnnnnnnnnnnnnnnnnnnnnnnnnnnnnnnnnnnnnnnnnnnnnnnnnnnnnnnnnnnnnnnnnnnnnnnnnnnnnnnnnnnnnnnnnnnnnnnnnnnnnnnnnnnnnnnnnnnnnnnnnnnnnnnnnnnnnnnnnnnnnnnnnnnnnnnnnnnnnnnnnnnnnnnnnnnnnnnnnnnnnnnnnnnnnnnnnnnnnnnnnnnnnnnnnnnnnnnnnnnnnnnnnnnnnnnnnnnnnnnnnnnnnnnnnnnnnnnnnnnnnnnnnnnnnnnnnnnnnnnnnnnnnnnnnnnnnnnnnnnnnnnnnnnnnnnnnnnnnnnnnnnnnnnnnnnnnnnnnnnnnnnnnnnnnnnnnnnnnnnnnnnnnnnnnnnnnnnnnnnnnnnnnnnnnnnnnnnnnnnnnnnnnnnnnnnnnnnnnnnnnnnnnnnnnnnnnnnnnnnnnnnnnnnnnnnnnnnnnnnnnnnnnnnnnnnnnnnnnnnnnnnnnnnnnnnnnnnnnnnnnnnnnnnnnnnnnnnnnnnnnnnnnnnnnnnnnnnnnnnnnnnnnnnnnnnnnnnnnnnnnnnnnnnnnnnnnnnnnnnnnnnnnnnnnnnnnnnnnnnnnnnnnnnnnnnnnnnnnnnnnnnnnnnnnnnnnnnnnnnnnnnnnnnnnnnnnnnnnnnnnnnnnnnnnnnnnnnnnnnnnnnnnnnnnnnnnnnnnnnnnnnnnnnnnnnnnnnnnnnnnnnnnnnnnnnnnnnnnnnnnnnnnnnnnnnnnnnnnnnnnnnnnnnnnnnnnnnnnnnnnnnnnnnnnnnnnnnnnnnnnnnnnnnnnnnnnnnnnnnnnnnnnnnnnnnnnnnnnnnnnnnnnnnnnnnnnnnnnnnnnnnnnnnnnnnnnnnnnnnnnnnnnnnnnnnnnnnnnnnnnnnnnnnnnnnnnnnnnnnnnnnnnnnnnnnnnnnnnnnnnnnnnnnnnnnnnnnnnnnnnnnnnnnnnnnnnnnnnnnnnnnnnnnnnnnnnnnnnnnnnnnnnnnnnnnnnnnnnnnnnnnnnnnnnnnnnnnnnnnnnnnnnnnnnnnnnnnnnnnnnnnnnnnnnnnnnnnnnnnnnnnnnnnnnnnnnnnnnnnnnnnnnnnnnnnnnnnnnnnnnnnnnnnnnnnnnnnnnnnnnnnnnnnnnnnnnnnnnnnnnnnnnnnnnnnnnnnnnnnnnnnnnnnnnnnnnnnnnnnnnnnnnnnnnnnnnnnnnnnnnnnnnnnnnnnnnnnnnnnnnnnnnnnnnnnnnnnnnnnnnnnnnnnnnnnnnnnnnnnnnnnnnnnnnnnnnnnnnnnnnnnnnnnnnnnnnnnnnnnnnnnnnnnnnnnnnnnnnnnnnnnnnnnnnnnnnnnnnnnnnnnnnnnnnnnnnnnnnnnnnnnnnnnnnnnnnnnnnnnnnnnnnnnnnnnnnnnnnnnnnnnnnnnnnnnnnnnnnnnnnnnnnnnnnnnnnnnnnnnnnnnnnnnnnnnnnnnnnnnnnnnnnnnnnnnnnnnnnnnnnnnnnnnnnnnnnnnnnnnnnnnnnnnnnnnnnnnnnnnnnnnnnnnnnnnnnnnnnnnnnnnnnnnnnnnnnnnnnnnnnnnnnnnnnnnnnnnnnnnnnnnnnnnnnnnnnnnnnnnnnnnnnnnnnnnnnnnnnnnnnnnnnnnnnnnnnnnnnnnnnnnnnnnnnnnnnnnnnnnnnnnnnnnnnnnnnnnnnnnnnnnnnnnnnnnnnnnnnnnnnnnnnnnnnnnnnnnnnnnnnnnnnnnnnnnnnnnnnnnnnnnnnnnnnnnnnnnnnnnnnnnnnnnnnnnnnnnnnnnnnnnnnnnnnnnnnnnnnnnnnnnnnnnnnnnnnnnnnnnnnnnnnnnnnnnnnnnnnnnnnnnnnnnnnnnnnnnnnnnnnnnnnnnnnnnnnnnnnnnnnnnnnnnnnnnnnnnnnnnnnnnnnnnnnnnnnnnnnnnnnnnnnnnnnnnnnnnnnnnnnnnnnnnnnnnnnnnnnnnnnnnnnnnnnnnnnnnnnnnnnnnnnnnnnnnnnnnnnnnnnnnnnnnnnnnnnnnnnnnnnnnnnnnnnnnnnnnnnnnnnnnnnnnnnnnnnnnnnnnnnnnnnnnnnnnnnnnnnnnnnnnnnnnnnnnnnnnnnnnnnnnnnnnnnnnnnnnnnnnnnnnnnnnnnnnnnnnnnnnnnnnnnnnnnnnnnnnnnnnnnnnnnnnnnnnnnnnnnnnnnnnnnnnnnnnnnnnnnnnnnnnnnnnnnnnnnnnnnnnnnnnnnnnnnnnnnnnnnnnnnnnnnnnnnnnnnnnnnnnnnnnnnnnnnnnnnnnnnnnnnnnnnnnnnnnnnnnnnnnnnnnnnnnnnnnnnnnnnnnnnnnnnnnnnnnnnnnnnnnnnnnnnnnnnnnnnnnnnnnnnnnnnnnnnnnnnnnnnnnnnnnnnnnnnnnnnnnnnnnnnnnnnnnnnnnnnnnnnnnnnnnnnnnnnnnnnnnnnnnnnnnnnnnnnnnnnnnnnnnnnnnnnnnnnnnnnnnnnnnnnnnnnnnnnnnnnnnnnnnnnnnnnnnnnnnnnnnnnnnnnnnnnnnnnnnnnnnnnnnnnnnnnnnnnnnnnnnnnnnnnnnnnnnnnnnnnnnnnnnnnnnnnnnnnnnnnnnnnnnnnnnnnnnnnnnnnnnnnnnnnnnnnnnnnnnnnnnnnnnnnnnnnnnnnnnnnnnnnnnnnnnnnnnnnnnnnnnnnnnnnnnnnnnnnnnnnnnnnnnnnnnnnnnnnnnnnnnnnnnnnnnnnnnnnnnnnnnnnnnnnnnnnnnnnnnnnnnnnnnnnnnnnnnnnnnnnnnnnnnnnnnnnnnnnnnnnnnnnnnnnnnnnnnnnnnnnnnnnnnnnnnnnnnnnnnnnnnnnnnnnnnnnnnnnnnnnnnnnnnnnnnnnnnnnnnnnnnnnnnnnnnnnnnnnnnnnnnnnnnnnnnnnnnnnnnnnnnnnnnnnnnnnnnnnnnnnnnnnnnnnnnnnnnnnnnnnnnnnnnnnnnnnnnnnnnnnnnnnnnnnnnnnnnnnnnnnnnnnnnnnnnnnnnnnnnnnnnnnnnnnnnnnnnnnnnnnnnnnnnnnnnnnnnnnnnnnnnnnnnnnnnnnnnnnnnnnnnnnnnnnnnnnnnnnnnnnnnnnnnnnnnnnnnnnnnnnnnnnnnnnnnnnnnnnnnnnnnnnnnnnnnnnnnnnnnnnnnnnnnnnnnnnnnnnnnnnnnnnnnnnnnnnnnnnnnnnnnnnnnnnnnnnnnnnnnnnnnnnnnnnnnnnnnnnnnnnnnnnnnnnnnnnnnnnnnnnnnnnnnnnnnnnnnnnnnnnnnnnnnnnnnnnnnnnnnnnnnnnnnnnnnnnnnnnnnnnnnnnnnnnnnnnnnnnnnnnnnnnnnnnnnnnnnnnnnnnnnnnnnnnnnnnnnnnnnnnnnnnnnnnnnnnnnnnnnnnnnnnnnnnnnnnnnnnnnnnnnnnnnnnnnnnnnnnnnnnnnnnnnnnnnnnnnnnnnnnnnnnnnnnnnnnnnnnnnnnnnnnnnnnnnnnnnnnnnnnnnnnnnnnnnnnnnnnnnnnnnnnnnnnnnnnnnnnnnnnnnnnnnnnnnnnnnnnnnnnnnnnnnnnnnnnnnnnnnnnnnnnnnnnnnnnnnnnnnnnnnnnnnnnnnnnnnnnnnnnnnnnnnnnnnnnnnnnnnnnnnnnnnnnnnnnnnnnnnnnnnnnnnnnnnnnnnnnnnnnnnnnnnnnnnnnnnnnnnnnnnnnnnnnnnnnnnnnnnnnnnnnnnnnnnnnnnnnnnnnnnnnnnnnnnnnnnnnnnnnnnnnnnnnnnnnnnnnnnnnnnnnnnnnnnnnnnnnnnnnnnnnnnnnnnnnnnnnnnnnnnnnnnnnnnnnnnnnnnnnnnnnnnnnnnnnnnnnnnnnnnnnnnnnnnnnnnnnnnnnnnnnnnnnnnnnnnnnnnnnnnnnnnnnnnnnnnnnnnnnnnnnnnnnnnnnnnnnnnnnnnnnnnnnnnnnnnnnnnnnnnnnnnnnnnnnnnnnnnnnnnnnnnnnnnnnnnnnnnnnnnnnnnnnnnnnnnnnnnnnnnnnnnnnnnnnnnnnnnnnnnnnnnnnnnnnnnnnnnnnnnnnnnnnnnnnnnnnnnnnnnnnnnnnnnnnnnnnnnnnnnnnnnnnnnnnnnnnnnnnnnnnnnnnnnnnnnnnnnnnnnnnnnnnnnnnnnnnnnnnnnnnnnnnnnnnnnnnnnnnnnnnnnnnnnnnnnnnnnnnnnnnnnnnnnnnnnnnnnnnnnnnnnnnnnnnnnnnnnnnnnnnnnnnnnnnnnnnnnnnnnnnnnnnnnnnnnnnnnnnnnnnnnnnnnnnnnnnnnnnnnnnnnnnnnnnnnnnnnnnnnnnnnnnnnnnnnnnnnnnnnnnnnnnnnnnnnnnnnnnnnnnnnnnnnnnnnnnnnnnnnnnnnnnnnnnnnnnnnnnnnnnnnnnnnnnnnnnnnnnnnnnnnnnnnnnnnnnnnnnnnnnnnnnnnnnnnnnnnnnnnnnnnnnnnnnnnnnnnnnnnnnnnnnnnnnnnnnnnnnnnnnnnnnnnnnnnnnnnnnnnnnnnnnnnnnnnnnnnnnnnnnnnnnnnnnnnnnnnnnnnnnnnnnnnnnnnnnnnnnnnnnnnnnnnnnnnnnnnnnnnnnnnnnnnnnnnnnnnnnnnnnnnnnnnnnnnnnnnnnnnnnnnnnnnnnnnnnnnnnnnnnnnnnnnnnnnnnnnnnnnnnnnnnnnnnnnnnnnnnnnnnnnnnnnnnnnnnnnnnnnnnnnnnnnnnnnnnnnnnnnnnnnnnnnnnnnnnnnnnnnnnnnnnnnnnnnnnnnnnnnnnnnnnnnnnnnnnnnnnnnnnnnnnnnnnnnnnnnnnnnnnnnnnnnnnnnnnnnnnnnnnnnnnnnnnnnnnnnnnnnnnnnnnnnnnnnnnnnnnnnnnnnnnnnnnnnnnnnnnnnnnnnnnnnnnnnnnnnnnnnnnnnnnnnnnnnnnnnnnnnnnnnnnnnnnnnnnnnnnnnnnnnnnnnnnnnnnnnnnnnnnnnnnnnnnnnnnnnnnnnnnnnnnnnnnnnnnnnnnnnnnnnnnnnnnnnnnnnnnnnnnnnnnnnnnnnnnnnnnnnnnnnnnnnnnnnnnnnnnnnnnnnnnnnnnnnnnnnnnnnnnnnnnnnnnnnnnnnnnnnnnnnnnnnnnnnnnnnnnnnnnnnnnnnnnnnnnnnnnnnnnnnnnnnnnnnnnnnnnnnnnnnnnnnnnnnnnnnnnnnnnnnnnnnnnnnnnnnnnnnnnnnnnnnnnnnnnnnnnnnnnnnnnnnnnnnnnnnnnnnnnnnnnnnnnnnnnnnnnnnnnnnnnnnnnnnnnnnnnnnnnnnnnnnnnnnnnnnnnnnnnnnnnnnnnnnnnnnnnnnnnnnnnnnnnnnnnnnnnnnnnnnnnnnnnnnnnnnnnnnnnnnnnnnnnnnnnnnnnnnnnnnnnnnnnnnnnnnnnnnnnnnnnnnnnnnnnnnnnnnnnnnnnnnnnnnnnnnnnnnnnnnnnnnnnnnnnnnnnnnnnnnnnnnnnnnnnnnnnnnnnnnnnnnnnnnnnnnnnnnnnnnnnnnnnnnnnnnnnnnnnnnnnnnnnnnnnnnnnnnnnnnnnnnnnnnnnnnnnnnnnnnnnnnnnnnnnnnnnnnnnnnnnnnnnnnnnnnnnnnnnnnnnnnnnnnnnnnnnnnnnnnnnnnnnnnnnnnnnnnnnnnnnnnnnnnnnnnnnnnnnnnnnnnnnnnnnnnnnnnnnnnnnnnnnnnnnnnnnnnnnnnnnnnnnnnnnnnnnnnnnnnnnnnnnnnnnnnnnnnnnnnnnnnnnnnnnnnnnnnnnnnnnnnnnnnnnnnnnnnnnnnnnnnnnnnnnnnnnnnnnnnnnnnnnnnnnnnnnnnnnnnnnnnnnnnnnnnnnnnnnnnnnnnnnnnnnnnnnnnnnnnnnnnnnnnnnnnnnnnnnnnnnnnnnnnnnnnnnnnnnnnnnnnnnnnnnnnnnnnnnnnnnnnnnnnnnnnnnnnnnnnnnnnnnnnnnnnnnnnnnnnnnnnnnnnnnnnnnnnnnnnnnnnnnnnnnnnnnnnnnnnnnnnnnnnnnnnnnnnnnnnnnnnnnnnnnnnnnnnnnnnnnnnnnnnnnnnnnnnnnnnnnnnnnnnnnnnnnnnnnnnnnnnnnnnnnnnnnnnnnnnnnnnnnnnnnnnnnnnnnnnnnnnnnnnnnnnnnnnnnnnnnnnnnnnnnnnnnnnnnnnnnnnnnnnnnnnnnnnnnnnnnnnnnnnnnnnnnnnnnnnnnnnnnnnnnnnnnnnnnnnnnnnnnnnnnnnnnnnnnnnnnnnnnnnnnnnnnnnnnnnnnnnnnnnnnnnnnnnnnnnnnnnnnnnnnnnnnnnnnnnnnnnnnnnnnnnnnnnnnnnnnnnnnnnnnnnnnnnnnnnnnnnnnnnnnnnnnnnnnnnnnnnnnnnnnnnnnnnnnnnnnnnnnnnnnnnnnnnnnnnnnnnnnnnnnnnnnnnnnnnnnnnnnnnnnnnnnnnnnnnnnnnnnnnnnnnnnnnnnnnnnnnnnnnnnnnnnnnnnnnnnnnnnnnnnnnnnnnnnnnnnnnnnnnnnnnnnnnnnnnnnnnnnnnnnnnnnnnnnnnnnnnnnnnnnnnnnnnnnnnnnnnnnnnnnnnnnnnnnnnnnnnnnnnnnnnnnnnnnnnnnnnnnnnnnnnnnnnnnnnnnnnnnnnnnnnnnnnnnnnnnnnnnnnnnnnnnnnnnnnnnnnnnnnnnnnnnnnnnnnnnnnnnnnnnnnnnnnnnnnnnnnnnnnnnnnnnnnnnnnnnnnnnnnnnnnnnnnnnnnnnnnnnnnnnnnnnnnnnnnnnnnnnnnnnnnnnnnnnnnnnnnnnnnnnnnnnnnnnnnnnnnnnnnnnnnnnnnnnnnnnnnnnnnnnnnnnnnnnnnnnnnnnnnnnnnnnnnnnnnnnnnnnnnnnnnnnnnnnnnnnnnnnnnnnnnnnnnnnnnnnnnnnnnnnnnnnnnnnnnnnnnnnnnnnnnnnnnnnnnnnnnnnnnnnnnnnnnnnnnnnnnnnnnnnnnnnnnnnnnnnnnnnnnnnnnnnnnnnnnnnnnnnnnnnnnnnnnnnnnnnnnnnnnnnnnnnnnnnnnnnnnnnnnnnnnnnnnnnnnnnnnnnnnnnnnnnnnnnnnnnnnnnnnnnnnnnnnnnnnnnnnnnnnnnnnnnnnnnnnnnnnnnnnnnnnnnnnnnnnnnnnnnnnnnnnnnnnnnnnnnnnnnnnnnnnnnnnnnnnnnnnnnnnnnnnnnnnnnnnnnnnnnnnnnnnnnnnnnnnnnnnnnnnnnnnnnnnnnnnnnnnnnnnnnnnnnnnnnnnnnnnnnnnnnnnnnnnnnnnnnnnnnnnnnnnnnnnnnnnnnnnnnnnnnnnnnnnnnnnnnnnnnnnnnnnnnnnnnnnnnnnnnnnnnnnnnnnnnnnnnnnnnnnnnnnnnnnnnnnnnnnnnnnnnnnnnnnnnnnnnnnnnnnnnnnnnnnnnnnnnnnnnnnnnnnnnnnnnnnnnnnnnnnnnnnnnnnnnnnnnnnnnnnnnnnnnnnnnnnnnnnnnnnnnnnnnnnnnnnnnnnnnnnnnnnnnnnnnnnnnnnnnnnnnnnnnnnnnnnnnnnnnnnnnnnnnnnnnnnnnnnnnnnnnnnnnnnnnnnnnnnnnnnnnnnnnnnnnnnnnnnnnnnnnnnnnnnnnnnnnnnnnnnnnnnnnnnnnnnnnnnnnnnnnnnnnnnnnnnnnnnnnnnnnnnnnnnnnnnnnnnnnnnnnnnnnnnnnnnnnnnnnnnnnnnnnnnnnnnnnnnnnnnnnnnnnnnnnnnnnnnnnnnnnnnnnnnnnnnnnnnnnnnnnnnnnnnnnnnnnnnnnnnnnnnnnnnnnnnnnnnnnnnnnnnnnnnnnnnnnnnnnnnnnnnnnnnnnnnnnnnnnnnnnnnnnnnnnnnnnnnnnnnnnnnnnnnnnnnnnnnnnnnnnnnnnnnnnnnnnnnnnnnnnnnnnnnnnnnnnnnnnnnnnnnnnnnnnnnnnnnnnnnnnnnnnnnnnnnnnnnnnnnnnnnnnnnnnnnnnnnnnnnnnnnnnnnnnnnnnnnnnnnnnnnnnnnnnnnnnnnnnnnnnnnnnnnnnnnnnnnnnnnnnnnnnnnnnnnnnnnnnnnnnnnnnnnnnnnnnnnnnnnnnnnnnnnnnnnnnnnnnnnnnnnnnnnnnnnnnnnnnnnnnnnnnnnnnnnnnnnnnnnnnnnnnnnnnnnnnnnnnnnnnnnnnnnnnnnnnnnnnnnnnnnnnnnnnnnnnnnnnnnnnnnnnnnnnnnnnnnnnnnnnnnnnnnnnnnnnnnnnnnnnnnnnnnnnnnnnnnnnnnnnnnnnnnnnnnnnnnnnnnnnnnnnnnnnnnnnnnnnnnnnnnnnnnnnnnnnnnnnnnnnnnnnnnnnnnnnnnnnnnnnnnnnnnnnnnnnnnnnnnnnnnnnnnnnnnnnnnnnnnnnnnnnnnnnnnnnnnnnnnnnnnnnnnnnnnnnnnnnnnnnnnnnnnnnnnnnnnnnnnnnnnnnnnnnnnnnnnnnnnnnnnnnnnnnnnnnnnnnnnnnnnnnnnnnnnnnnnnnnnnnnnnnnnnnnnnnnnnnnnnnnnnnnnnnnnnnnnnnnnnnnnnnnnnnnnnnnnnnnnnnnnnnnnnnnnnnnnnnnnnnnnnnnnnnnnnnnnnnnnnnnnnnnnnnnnnnnnnnnnnnnnnnnnnnnnnnnnnnnnnnnnnnnnnnnnnnnnnnnnnnnnnnnnnnnnnnnnnnnnnnnnnnnnnnnnnnnnnnnnnnnnnnnnnnnnnnnnnnnnnnnnnnnnnnnnnnnnnnnnnnnnnnnnnnnnnnnnnnnnnnnnnnnnnnnnnnnnnnnnnnnnnnnnnnnnnnnnnnnnnnnnnnnnnnnnnnnnnnnnnnnnnnnnnnnnnnnnnnnnnnnnnnnnnnnnnnnnnnnnnnnnnnnnnnnnnnnnnnnnnnnnnnnnnnnnnnnnnnnnnnnnnnnnnnnnnnnnnnnnnnnnnnnnnnnnnnnnnnnnnnnnnnnnnnnnnnnnnnnnnnnnnnnnnnnnnnnnnnnnnnnnnnnnnnnnnnnnnnnnnnnnnnnnnnnnnnnnnnnnnnnnnnnnnnnnnnnnnnnnnnnnnnnnnnnnnnnnnnnnnnnnnnnnnnnnnnnnnnnnnnnnnnnnnnnnnnnnnnnnnnnnnnnnnnnnnnnnnnnnnnnnnnnnnnnnnnnnnnnnnnnnnnnnnnnnnnnnnnnnnnnnnnnnnnnnnnnnnnnnnnnnnnnnnnnnnnnnnnnnnnnnnnnnnnnnnnnnnnnnnnnnnnnnnnnnnnnnnnnnnnnnnnnnnnnnnnnnnnnnnnnnnnnnnnnnnnnnnnnnnnnnnnnnnnnnnnnnnnnnnnnnnnnnnnnnnnnnnnnnnnnnnnnnnnnnnnnnnnnnnnnnnnnnnnnnnnnnnnnnnnnnnnnnnnnnnnnnnnnnnnnnnnnnnnnnnnnnnnnnnnnnnnnnnnnnnnnnnnnnnnnnnnnnnnnnnnnnnnnnnnnnnnnnnnnnnnnnnnnnnnnnnnnnnnnnnnnnnnnnnnnnnnnnnnnnnnnnnnnnnnnnnnnnnnnnnnnnnnnnnnnnnnnnnnnnnnnnnnnnnnnnnnnnnnnnnnnnnnnnnnnnnnnnnnnnnnnnnnnnnnnnnnnnnnnnnnnnnnnnnnnnnnnnnnnnnnnnnnnnnnnnnnnnnnnnnnnnnnnnnnnnnnnnnnnnnnnnnnnnnnnnnnnnnnnnnnnnnnnnnnnnnnnnnnnnnnnnnnnnnnnnnnnnnnnnnnnnnnnnnnnnnnnnnnnnnnnnnnnnnnnnnnnnnnnnnnnnnnnnnnnnnnnnnnnnnnnnnnnnnnnnnnnnnnnnnnnnnnnnnnnnnnnnnnnnnnnnnnnnnnnnnnnnnnnnnnnnnnnnnnnnnnnnnnnnnnnnnnnnnnnnnnnnnnnnnnnnnnnnnnnnnnnnnnnnnnnnnnnnnnnnnnnnnnnnnnnnnnnnnnnnnnnnnnnnnnnnnnnnnnnnnnnnnnnnnnnnnnnnnnnnnnnnnnnnnnnnnnnnnnnnnnnnnnnnnnnnnnnnnnnnnnnnnnnnnnnnnnnnnnnnnnnnnnnnnnnnnnnnnnnnnnnnnnnnnnnnnnnnnnnnnnnnnnnnnnnnnnnnnnnnnnnnnnnnnnnnnnnnnnnnnnnnnnnnnnnnnnnnnnnnnnnnnnnnnnnnnnnnnnnnnnnnnnnnnnnnnnnnnnnnnnnnnnnnnnnnnnnnnnnnnnnnnnnnnnnnnnnnnnnnnnnnnnnnnnnnnnnnnnnnnnnnnnnnnnnnnnnnnnnnnnnnnnnnnnnnnnnnnnnnnnnnnnnnnnnnnnnnnnnnnnnnnnnnnnnnnnnnnnnnnnnnnnnnnnnnnnnnnnnnnnnnnnnnnnnnnnnnnnnnnnnnnnnnnnnnnnnnnnnnnnnnnnnnnnnnnnnnnnnnnnnnnnnnnnnnnnnnnnnnnnnnnnnnnnnnnnnnnnnnnnnnnnnnnnnnnnnnnnnnnnnnnnnnnnnnnnnnnnnnnnnnnnnnnnnnnnnnnnnnnnnnnnnnnnnnnnnnnnnnnnnnnnnnnnnnnnnnnnnnnnnnnnnnnnnnnnnnnnnnnnnnnnnnnnnnnnnnnnnnnnnnnnnnnnnnnnnnnnnnnnnnnnnnnnnnnnnnnnnnnnnnnnnnnnnnnnnnnnnnnnnnnnnnnnnnnnnnnnnnnnnnnnnnnnnnnnnnnnnnnnnnnnnnnnnnnnnnnnnnnnnnnnnnnnnnnnnnnnnnnnnnnnnnnnnnnnnnnnnnnnnnnnnnnnnnnnnnnnnnnnnnnnnnnnnnnnnnnnnnnnnnnnnnnnnnnnnnnnnnnnnnnnnnnnnnnnnnnnnnnnnnnnnnnnnnnnnnnnnnnnnnnnnnnnnnnnnnnnnnnnnnnnnnnnnnnnnnnnnnnnnnnnnnnnnnnnnnnnnnnnnnnnnnnnnnnnnnnnnnnnnnnnnnnnnnnnnnnnnnnnnnnnnnnnnnnnnnnnnnnnnnnnnnnnnnnnnnnnnnnnnnnnnnnnnnnnnnnnnnnnnnnnnnnnnnnnnnnnnnnnnnnnnnnnnnnnnnnnnnnnnnnnnnnnnnnnnnnnnnnnnnnnnnnnnnnnnnnnnnnnnnnnnnnnnnnnnnnnnnnnnnnnnnnnnnnnnnnnnnnnnnnnnnnnnnnnnnnnnnnnnnnnnnnnnnnnnnnnnnnnnnnnnnnnnnnnnnnnnnnnnnnnnnnnnnnnnnnnnnnnnnnnnnnnnnnnnnnnnnnnnnnnnnnnnnnnnnnnnnnnnnnnnnnnnnnnnnnnnnnnnnnnnnnnnnnnnnnnnnnnnnnnnnnnnnnnnnnnnnnnnnnnnnnnnnnnnnnnnnnnnnnnnnnnnnnnnnnnnnnnnnnnnnnnnnnnnnnnnnnnnnnnnnnnnnnnnnnnnnnnnnnnnnnnnnnnnnnnnnnnnnnnnnnnnnnnnnnnnnnnnnnnnnnnnnnnnnnnnnnnnnnnnnnnnnnnnnnnnnnnnnnnnnnnnnnnnnnnnnnnnnnnnnnnnnnnnnnnnnnnnnnnnnnnnnnnnnnnnnnnnnnnnnnnnnnnnnnnnnnnnnnnnnnnnnnnnnnnnnnnnnnnnnnnnnnnnnnnnnnnnnnnnnnnnnnnnnnnnnnnnnnnnnnnnnnnnnnnnnnnnnnnnnnnnnnnnnnnnnnnnnnnnnnnnnnnnnnnnnnnnnnnnnnnnnnnnnnnnnnnnnnnnnnnnnnnnnnnnnnnnnnnnnnnnnnnnnnnnnnnnnnnnnnnnnnnnnnnnnnnnnnnnnnnnnnnnnnnnnnnnnnnnnnnnnnnnnnnnnnnnnnnnnnnnnnnnnnnnnnnnnnnnnnnnnnnnnnnnnnnnnnnnnnnnnnnnnnnnnnnnnnnnnnnnnnnnnnnnnnnnnnnnnnnnnnnnnnnnnnnnnnnnnnnnnnnnnnnnnnnnnnnnnnnnnnnnnnnnnnnnnnnnnnnnnnnnnnnnnnnnnnnnnnnnnnnnnnnnnnnnnnnnnnnnnnnnnnnnnnnnnnnnnnnnnnnnnnnnnnnnnnnnnnnnnnnnnnnnnnnnnnnnnnnnnnnnnnnnnnnnnnnnnnnnnnnnnnnnnnnnnnnnnnnnnnnnnnnnnnnnnnnnnnnnnnnnnnnnnnnnnnnnnnnnnnnnnnnnnnnnnnnnnnnnnnnnnnnnnnnnnnnnnnnnnnnnnnnnnnnnnnnnnnnnnnnnnnnnnnnnnnnnnnnnnnnnnnnnnnnnnnnnnnnnnnnnnnnnnnnnnnnnnnnnnnnnnnnnnnnnnnnnnnnnnnnnnnnnnnnnnnnnnnnnnnnnnnnnnnnnnnnnnnnnnnnnnnnnnnnnnnnnnnnnnnnnnnnnnnnnnnnnnnnnnnnnnnnnnnnnnnnnnnnnnnnnnnnnnnnnnnnnnnnnnnnnnnnnnnnnnnnnnnnnnnnnnnnnnnnnnnnnnnnnnnnnnnnnnnnnnnnnnnnnnnnnnnnnnnnnnnnnnnnnnnnnnnnnnnnnnnnnnnnnnnnnnnnnnnnnnnnnnnnnnnnnnnnnnnnnnnnnnnnnnnnnnnnnnnnnnnnnnnnnnnnnnnnnnnnnnnnnnnnnnnnnnnnnnnnnnnnnnnnnnnnnnnnnnnnnnnnnnnnnnnnnnnnnnnnnnnnnnnnnnnnnnnnnnnnnnnnnnnnnnnnnnnnnnnnnnnnnnnnnnnnnnnnnnnnnnnnnnnnnnnnnnnnnnnnnnnnnnnnnnnnnnnnnnnnnnnnnnnnnnnnnnnnnnnnnnnnnnnnnnnnnnnnnnnnnnnnnnnnnnnnnnnnnnnnnnnnnnnnnnnnnnnnnnnnnnnnnnnnnnnnnnnnnnnnnnnnnnnnnnnnnnnnnnnnnnnnnnnnnnnnnnnnnnnnnnnnnnnnnnnnnnnnnnnnnnnnnnnnnnnnnnnnnnnnnnnnnnnnnnnnnnnnnnnnnnnnnnnnnnnnnnnnnnnnnnnnnnnnnnnnnnnnnnnnnnnnnnnnnnnnnnnnnnnnnnnnnnnnnnnnnnnnnnnnnnnnnnnnnnnnnnnnnnnnnnnnnnnnnnnnnnnnnnnnnnnnnnnnnnnnnnnnnnnnnnnnnnnnnnnnnnnnnnnnnnnnnnnnnnnnnnnnnnnnnnnnnnnnnnnnnnnnnnnnnnnnnnnnnnnnnnnnnnnnnnnnnnnnnnnnnnnnnnnnnnnnnnnnnnnnnnnnnnnnnnnnnnnnnnnnnnnnnnnnnnnnnnnnnnnnnnnnnnnnnnnnnnnnnnnnnnnnnnnnnnnnnnnnnnnnnnnnnnnnnnnnnnnnnnnnnnnnnnnnnnnnnnnnnnnnnnnnnnnnnnnnnnnnnnnnnnnnnnnnnnnnnnnnnnnnnnnnnnnnnnnnnnnnnnnnnnnnnnnnnnnnnnnnnnnnnnnnnnnnnnnnnnnnnnnnnnnnnnnnnnnnnnnnnnnnnnnnnnnnnnnnnnnnnnnnnnnnnnnnnnnnnnnnnnnnnnnnnnnnnnnnnnnnnnnnnnnnnnnnnnnnnnnnnnnnnnnnnnnnnnnnnnnnnnnnnnnnnnnnnnnnnnnnnnnnnnnnnnnnnnnnnnnnnnnnnnnnnnnnnnnnnnnnnnnnnnnnnnnnnnnnnnnnnnnnnnnnnnnnnnnnnnnnnnnnnnnnnnnnnnnnnnnnnnnnnnnnnnnnnnnnnnnnnnnnnnnnnnnnnnnnnnnnnnnnnnnnnnnnnnnnnnnnnnnnnnnnnnnnnnnnnnnnnnnnnnnnnnnnnnnnnnnnnnnnnnnnnnnnnnnnnnnnnnnnnnnnnnnnnnnnnnnnnnnnnnnnnnnnnnnnnnnnnnnnnnnnnnnnnnnnnnnnnnnnnnnnnnnnnnnnnnnnnnnnnnnnnnnnnnnnnnnnnnnnnnnnnnnnnnnnnnnnnnnnnnnnnnnnnnnnnnnnnnnnnnnnnnnnnnnnnnnnnnnnnnnnnnnnnnnnnnnnnnnnnnnnnnnnnnnnnnnnnnnnnnnnnnnnnnnnnnnnnnnnnnnnnnnnnnnnnnnnnnnnnnnnnnnnnnnnnnnnnnnnnnnnnnnnnnnnnnnnnnnnnnnnnnnnnnnnnnnnnnnnnnnnnnnnnnnnnnnnnnnnnnnnnnnnnnnnnnnnnnnnnnnnnnnnnnnnnnnnnnnnnnnnnnnnnnnnnnnnnnnnnnnnnnnnnnnnnnnnnnnnnnnnnnnnnnnnnnnnnnnnnnnnnnnnnnnnnnnnnnnnnnnnnnnnnnnnnnnnnnnnnnnnnnnnnnnnnnnnnnnnnnnnnnnnnnnnnnnnnnnnnnnnnnnnnnnnnnnnnnnnnnnnnnnnnnnnnnnnnnnnnnnnnnnnnnnnnnnnnnnnnnnnnnnnnnnnnnnnnnnnnnnnnnnnnnnnnnnnnnnnnnnnnnnnnnnnnnnnnnnnnnnnnnnnnnnnnnnnnnnnnnnnnnnnnnnnnnnnnnnnnnnnnnnnnnnnnnnnnnnnnnnnnnnnnnnnnnnnnnnnnnnnnnnnnnnnnnnnnnnnnnnnnnnnnnnnnnnnnnnnnnnnnnnnnnnnnnnnnnnnnnnnnnnnnnnnnnnnnnnnnnnnnnnnnnnnnnnnnnnnnnnnnnnnnnnnnnnnnnnnnnnnnnnnnnnnnnnnnnnnnnnnnnnnnnnnnnnnnnnnnnnnnnnnnnnnnnnnnnnnnnnnnnnnnnnnnnnnnnnnnnnnnnnnnnnnnnnnnnnnnnnnnnnnnnnnnnnnnnnnnnnnnnnnnnnnnnnnnnnnnnnnnnnnnnnnnnnnnnnnnnnnnnnnnnnnnnnnnnnnnnnnnnnnnnnnnnnnnnnnnnnnnnnnnnnnnnnnnnnnnnnnnnnnnnnnnnnnnnnnnnnnnnnnnnnnnnnnnnnnnnnnnnnnnnnnnnnnnnnnnnnnnnnnnnnnnnnnnnnnnnnnnnnnnnnnnnnnnnnnnnnnnnnnnnnnnnnnnnnnnnnnnnnnnnnnnnnnnnnnnnnnnnnnnnnnnnnnnnnnnnnnnnnnnnnnnnnnnnnnnnnnnnnnnnnnnnnnnnnnnnnnnnnnnnnnnnnnnnnnnnnnnnnnnnnnnnnnnnnnnnnnnnnnnnnnnnnnnnnnnnnnnnnnnnnnnnnnnnnnnnnnnnnnnnnnnnnnnnnnnnnnnnnnnnnnnnnnnnnnnnnnnnnnnnnnnnnnnnnnnnnnnnnnnnnnnnnnnnnnnnnnnnnnnnnnnnnnnnnnnnnnnnnnnnnnnnnnnnnnnnnnnnnnnnnnnnnnnnnnnnnnnnnnnnnnnnnnnnnnnnnnnnnnnnnnnnnnnnnnnnnnnnnnnnnnnnnnnnnnnnnnnnnnnnnnnnnnnnnnnnnnnnnnnnnnnnnnnnnnnnnnnnnnnnnnnnnnnnnnnnnnnnnnnnnnnnnnnnnnnnnnnnnnnnnnnnnnnnnnnnnnnnnnnnnnnnnnnnnnnnnnnnnnnnnnnnnnnnnnnnnnnnnnnnnnnnnnnnnnnnnnnnnnnnnnnnnnnnnnnnnnnnnnnnnnnnnnnnnnnnnnnnnnnnnnnnnnnnnnnnnnnnnnnnnnnnnnnnnnnnnnnnnnnnnnnnnnnnnnnnnnnnnnnnnnnnnnnnnnnnnnnnnnnnnnnnnnnnnnnnnnnnnnnnnnnnnnnnnnnnnnnnnnnnnnnnnnnnnnnnnnnnnnnnnnnnnnnnnnnnnnnnnnnnnnnnnnnnnnnnnnnnnnnnnnnnnnnnnnnnnnnnnnnnnnnnnnnnnnnnnnnnnnnnnnnnnnnnnnnnnnnnnnnnnnnnnnnnnnnnnnnnnnnnnnnnnnnnnnnnnnnnnnnnnnnnnnnnnnnnnnnnnnnnnnnnnnnnnnnnnnnnnnnnnnnnnnnnnnnnnnnnnnnnnnnnnnnnnnnnnnnnnnnnnnnnnnnnnnnnnnnnnnnnnnnnnnnnnnnnnnnnnnnnnnnnnnnnnnnnnnnnnnnnnnnnnnnnnnnnnnnnnnnnnnnnnnnnnnnnnnnnnnnnnnnnnnnnnnnnnnnnnnnnnnnnnnnnnnnnnnnnnnnnnnnnnnnnnnnnnnnnnnnnnnnnnnnnnnnnnnnnnnnnnnnnnnnnnnnnnnnnnnnnnnnnnnnnnnnnnnnnnnnnnnnnnnnnnnnnnnnnnnnnnnnnnnnnnnnnnnnnnnnnnnnnnnnnnnnnnnnnnnnnnnnnnnnnnnnnnnnnnnnnnnnnnnnnnnnnnnnnnnnnnnnnnnnnnnnnnnnnnnnnnnnnnnnnnnnnnnnnnnnnnnnnnnnnnnnnnnnnnnnnnnnnnnnnnnnnnnnnnnnnnnnnnnnnnnnnnnnnnnnnnnnnnnnnnnnnnnnnnnnnnnnnnnnnnnnnnnnnnnnnnnnnnnnnnnnnnnnnnnnnnnnnnnnnnnnnnnnnnnnnnnnnnnnnnnnnnnnnnnnnnnnnnnnnnnnnnnnnnnnnnnnnnnnnnnnnnnnnnnnnnnnnnnnnnnnnnnnnnnnnnnnnnnnnnnnnnnnnnnnnnnnnnnnnnnnnnnnnnnnnnnnnnnnnnnnnnnnnnnnnnnnnnnnnnnnnnnnnnnnnnnnnnnnnnnnnnnnnnnnnnnnnnnnnnnnnnnnnnnnnnnnnnnnnnnnnnnnnnnnnnnnnnnnnnnnnnnnnnnnnnnnnnnnnnnnnnnnnnnnnnnnnnnnnnnnnnnnnnnnnnnnnnnnnnnnnnnnnnnnnnnnnnnnnnnnnnnnnnnnnnnnnnnnnnnnnnnnnnnnnnnnnnnnnnnnnnnnnnnnnnnnnnnnnnnnnnnnnnnnnnnnnnnnnnnnnnnnnnnnnnnnnnnnnnnnnnnnnnnnnnnnnnnnnnnnnnnnnnnnnnnnnnnnnnnnnnnnnnnnnnnnnnnnnnnnnnnnnnnnnnnnnnnnnnnnnnnnnnnnnnnnnnnnnnnnnnnnnnnnnnnnnnnnnnnnnnnnnnnnnnnnnnnnnnnnnnnnnnnnnnnnnnnnnnnnnnnnnnnnnnnnnnnnnnnnnnnnnnnnnnnnnnnnnnnnnnnnnnnnnnnnnnnnnnnnnnnnnnnnnnnnnnnnnnnnnnnnnnnnnnnnnnnnnnnnnnnnnnnnnnnnnnnnnnnnnnnnnnnnnnnnnnnnnnnnnnnnnnnnnnnnnnnnnnnnnnnnnnnnnnnnnnnnnnnnnnnnnnnnnnnnnnnnnnnnnnnnnnnnnnnnnnnnnnnnnnnnnnnnnnnnnnnnnnnnnnnnnnnnnnnnnnnnnnnnnnnnnnnnnnnnnnnnnnnnnnnnnnnnnnnnnnnnnnnnnnnnnnnnnnnnnnnnnnnnnnnnnnnnnnnnnnnnnnnnnnnnnnnnnnnnnnnnnnnnnnnnnnnnnnnnnnnnnnnnnnnnnnnnnnnnnnnnnnnnnnnnnnnnnnnnnnnnnnnnnnnnnnnnnnnnnnnnnnnnnnnnnnnnnnnnnnnnnnnnnnnnnnnnnnnnnnnnnnnnnnnnnnnnnnnnnnnnnnnnnnnnnnnnnnnnnnnnnnnnnnnnnnnnnnnnnnnnnnnnnnnnnnnnnnnnnnnnnnnnnnnnnnnnnnnnnnnnnnnnnnnnnnnnnnnnnnnnnnnnnnnnnnnnnnnnnnnnnnnnnnnnnnnnnnnnnnnnnnnnnnnnnnnnnnnnnnnnnnnnnnnnnnnnnnnnnnnnnnnnnnnnnnnnnnnnnnnnnnnnnnnnnnnnnnnnnnnnnnnnnnnnnnnnnnnnnnnnnnnnnnnnnnnnnnnnnnnnnnnnnnnnnnnnnnnnnnnnnnnnnnnnnnnnnnnnnnnnnnnnnnnnnnnnnnnnnnnnnnnnnnnnnnnnnnnnnnnnnnnnnnnnnnnnnnnnnnnnnnnnnnnnnnnnnnnnnnnnnnnnnnnnnnnnnnnnnnnnnnnnnnnnnnnnnnnnnnnnnnnnnnnnnnnnnnnnnnnnnnnnnnnnnnnnnnnnnnnnnnnnnnnnnnnnnnnnnnnnnnnnnnnnnnnnnnnnnnnnnnnnnnnnnnnnnnnnnnnnnnnnnnnnnnnnnnnnnnnnnnnnnnnnnnnnnnnnnnnnnnnnnnnnnnnnnnnnnnnnnnnnnnnnnnnnnnnnnnnnnnnnnnnnnnnnnnnnnnnnnnnnnnnnnnnnnnnnnnnnnnnnnnnnnnnnnnnnnnnnnnnnnnnnnnnnnnnnnnnnnnnnnnnnnnnnnnnnnnnnnnnnnnnnnnnnnnnnnnnnnnnnnnnnnnnnnnnnnnnnnnnnnnnnnnnnnnnnnnnnnnnnnnnnnnnnnnnnnnnnnnnnnnnnnnnnnnnnnnnnnnnnnnnnnnnnnnnnnnnnnnnnnnnnnnnnnnnnnnnnnnnnnnnnnnnnnnnnnnnnnnnnnnnnnnnnnnnnnnnnnnnnnnnnnnnnnnnnnnnnnnnnnnnnnnnnnnnnnnnnnnnnnnnnnnnnnnnnnnnnnnnnnnnnnnnnnnnnnnnnnnnnnnnnnnnnnnnnnnnnnnnnnnnnnnnnnnnnnnnnnnnnnnnnnnnnnnnnnnnnnnnnnnnnnnnnnnnnnnnnnnnnnnnnnnnnnnnnnnnnnnnnnnnnnnnnnnnnnnnnnnnnnnnnnnnnnnnnnnnnnnnnnnnnnnnnnnnnnnnnnnnnnnnnnnnnnnnnnnnnnnnnnnnnnnnnnnnnnnnnnnnnnnnnnnnnnnnnnnnnnnnnnnnnnnnnnnnnnnnnnnnnnnnnnnnnnnnnnnnnnnnnnnnnnnnnnnnnnnnnnnnnnnnnnnnnnnnnnnnnnnnnnnnnnnnnnnnnnnnnnnnnnnnnnnnnnnnnnnnnnnnnnnnnnnnnnnnnnnnnnnnnnnnnnnnnnnnnnnnnnnnnnnnnnnnnnnnnnnnnnnnnnnnnnnnnnnnnnnnnnnnnnnnnnnnnnnnnnnnnnnnnnnnnnnnnnnnnnnnnnnnnnnnnnnnnnnnnnnnnnnnnnnnnnnnnnnnnnnnnnnnnnnnnnnnnnnnnnnnnnnnnnnnnnnnnnnnnnnnnnnnnnnnnnnnnnnnnnnnnnnnnnnnnnnnnnnnnnnnnnnnnnnnnnnnnnnnnnnnnnnnnnnnnnnnnnnnnnnnnnnnnnnnnnnnnnnnnnnnnnnnnnnnnnnnnnnnnnnnnnnnnnnnnnnnnnnnnnnnnnnnnnnnnnnnnnnnnnnnnnnnnnnnnnnnnnnnnnnnnnnnnnnnnnnnnnnnnnnnnnnnnnnnnnnnnnnnnnnnnnnnnnnnnnnnnnnnnnnnnnnnnnnnnnnnnnnnnnnnnnnnnnnnnnnnnnnnnnnnnnnnnnnnnnnnnnnnnnnnnnnnnnnnnnnnnnnnnnnnnnnnnnnnnnnnnnnnnnnnnnnnnnnnnnnnnnnnnnnnnnnnnnnnnnnnnnnnnnnnnnnnnnnnnnnnnnnnnnnnnnnnnnnnnnnnnnnnnnnnnnnnnnnnnnnnnnnnnnnnnnnnnnnnnnnnnnnnnnnnnnnnnnnnnnnnnnnnnnnnnnnnnnnnnnnnnnnnnnnnnnnnnnnnnnnnnnnnnnnnnnnnnnnnnnnnnnnnnnnnnnnnnnnnnnnnnnnnnnnnnnnnnnnnnnnnnnnnnnnnnnnnnnnnnnnnnnnnnnnnnnnnnnnnnnnnnnnnnnnnnnnnnnnnnnnnnnnnnnnnnnnnnnnnnnnnnnnnnnnnnnnnnnnnnnnnnnnnnnnnnnnnnnnnnnnnnnnnnnnnnnnnnnnnnnnnnnnnnnnnnnnnnnnnnnnnnnnnnnnnnnnnnnnnnnnnnnnnnnnnnnnnnnnnnnnnnnnnnnnnnnnnnnnnnnnnnnnnnnnnnnnnnnnnnnnnnnnnnnnnnnnnnnnnnnnnnnnnnnnnnnnnnnnnnnnnnnnnnnnnnnnnnnnnnnnnnnnnnnnnnnnnnnnnnnnnnnnnnnnnnnnnnnnnnnnnnnnnnnnnnnnnnnnnnnnnnnnnnnnnnnnnnnnnnnnnnnnnnnnnnnnnnnnnnnnnnnnnnnnnnnnnnnnnnnnnnnnnnnnnnnnnnnnnnnnnnnnnnnnnnnnnnnnnnnnnnnnnnnnnnnnnnnnnnnnnnnnnnnnnnnnnnnnnnnnnnnnnnnnnnnnnnnnnnnnnnnnnnnnnnnnnnnnnnnnnnnnnnnnnnnnnnnnnnnnnnnnnnnnnnnnnnnnnnnnnnnnnnnnnnnnnnnnnnnnnnnnnnnnnnnnnnnnnnnnnnnnnnnnnnnnnnnnnnnnnnnnnnnnnnnnnnnnnnnnnnnnnnnnnnnnnnnnnnnnnnnnnnnnnnnnnnnnnnnnnnnnnnnnnnnnnnnnnnnnnnnnnnnnnnnnnnnnnnnnnnnnnnnnnnnnnnnnnnnnnnnnnnnnnnnnnnnnnnnnnnnnnnnnnnnnnnnnnnnnnnnnnnnnnnnnnnnnnnnnnnnnnnnnnnnnnnnnnnnnnnnnnnnnnnnnnnnnnnnnnnnnnnnnnnnnnnnnnnnnnnnnnnnnnnnnnnnnnnnnnnnnnnnnnnnnnnnnnnnnnnnnnnnnnnnnnnnnnnnnnnnnnnnnnnnnnnnnnnnnnnnnnnnnnnnnnnnnnnnnnnnnnnnnnnnnnnnnnnnnnnnnnnnnnnnnnnnnnnnnnnnnnnnnnnnnnnnnnnnnnnnnnnnnnnnnnnnnnnnnnnnnnnnnnnnnnnnnnnnnnnnnnnnnnnnnnnnnnnnnnnnnnnnnnnnnnnnnnnnnnnnnnnnnnnnnnnnnnnnnnnnnnnnnnnnnnnnnnnnnnnnnnnnnnnnnnnnnnnnnnnnnnnnnnnnnnnnnnnnnnnnnnnnnnnnnnnnnnnnnnnnnnnnnnnnnnnnnnnnnnnnnnnnnnnnnnnnnnnnnnnnnnnnnnnnnnnnnnnnnnnnnnnnnnnnnnnnnnnnnnnnnnnnnnnnnnnnnnnnnnnnnnnnnnnnnnnnnnnnnnnnnnnnnnnnnnnnnnnnnnnnnnnnnnnnnnnnnnnnnnnnnnnnnnnnnnnnnnnnnnnnnnnnnnnnnnnnnnnnnnnnnnnnnnnnnnnnnnnnnnnnnnnnnnnnnnnnnnnnnnnnnnnnnnnnnnnnnnnnnnnnnnnnnnnnnnnnnnnnnnnnnnnnnnnnnnnnnnnnnnnnnnnnnnnnnnnnnnnnnnnnnnnnnnnnnnnnnnnnnnnnnnnnnnnnnnnnnnnnnnnnnnnnnnnnnnnnnnnnnnnnnnnnnnnnnnnnnnnnnnnnnnnnnnnnnnnnnnnnnnnnnnnnnnnnnnnnnnnnnnnnnnnnnnnnnnnnnnnnnnnnnnnnnnnnnnnnnnnnnnnnnnnnnnnnnnnnnnnnnnnnnnnnnnnnnnnnnnnnnnnnnnnnnnnnnnnnnnnnnnnnnnnnnnnnnnnnnnnnnnnnnnnnnnnnnnnnnnnnnnnnnnnnnnnnnnnnnnnnnnnnnnnnnnnnnnnnnnnnnnnnnnnnnnnnnnnnnnnnnnnnnnnnnnnnnnnnnnnnnnnnnnnnnnnnnnnnnnnnnnnnnnnnnnnnnnnnnnnnnnnnnnnnnnnnnnnnnnnnnnnnnnnnnnnnnnnnnnnnnnnnnnnnnnnnnnnnnnnnnnnnnnnnnnnnnnnnnnnnnnnnnnnnnnnnnnnnnnnnnnnnnnnnnnnnnnnnnnnnnnnnnnnnnnnnnnnnnnnnnnnnnnnnnnnnnnnnnnnnnnnnnnnnnnnnnnnnnnnnnnnnnnnnnnnnnnnnnnnnnnnnnnnnnnnnnnnnnnnnnnnnnnnnnnnnnnnnnnnnnnnnnnnnnnnnnnnnnnnnnnnnnnnnnnnnnnnnnnnnnnnnnnnnnnnnnnnnnnnnnnnnnnnnnnnnnnnnnnnnnnnnnnnnnnnnnnnnnnnnnnnnnnnnnnnnnnnnnnnnnnnnnnnnnnnnnnnnnnnnnnnnnnnnnnnnnnnnnnnnnnnnnnnnnnnnnnnnnnnnnnnnnnnnnnnnnnnnnnnnnnnnnnnnnnnnnnnnnnnnnnnnnnnnnnnnnnnnnnnnnnnnnnnnnnnnnnnnnnnnnnnnnnnnnnnnnnnnnnnnnnnnnnnnnnnnnnnnnnnnnnnnnnnnnnnnnnnnnnnnnnnnnnnnnnnnnnnnnnnnnnnnnnnnnnnnnnnnnnnnnnnnnnnnnnnnnnnnnnnnnnnnnnnnnnnnnnnnnnnnnnnnnnnnnnnnnnnnnnnnnnnnnnnnnnnnnnnnnnnnnnnnnnnnnnnnnnnnnnnnnnnnnnnnnnnnnnnnnnnnnnnnnnnnnnnnnnnnnnnnnnnnnnnnnnnnnnnnnnnnnnnnnnnnnnnnnnnnnnnnnnnnnnnnnnnnnnnnnnnnnnnnnnnnnnnnnnnnnnnnnnnnnnnnnnnnnnnnnnnnnnnnnnnnnnnnnnnnnnnnnnnnnnnnnnnnnnnnnnnnnnnnnnnnnnnnnnnnnnnnnnnnnnnnnnnnnnnnnnnnnnnnnnnnnnnnnnnnnnnnnnnnnnnnnnnnnnnnnnnnnnnnnnnnnnnnnnnnnnnnnnnnnnnnnnnnnnnnnnnnnnnnnnnnnnnnnnnnnnnnnnnnnnnnnnnnnnnnnnnnnnnnnnnnnnnnnnnnnnnnnnnnnnnnnnnnnnnnnnnnnnnnnnnnnnnnnnnnnnnnnnnnnnnnnnnnnnnnnnnnnnnnnnnnnnnnnnnnnnnnnnnnnnnnnnnnnnnnnnnnnnnnnnnnnnnnnnnnnnnnnnnnnnnnnnnnnnnnnnnnnnnnnnnnnnnnnnnnnnnnnnnnnnnnnnnnnnnnnnnnnnnnnnnnnnnnnnnnnnnnnnnnnnnnnnnnnnnnnnnnnnnnnnnnnnnnnnnnnnnnnnnnnnnnnnnnnnnnnnnnnnnnnnnnnnnnnnnnnnnnnnnnnnnnnnnnnnnnnnnnnnnnnnnnnnnnnnnnnnnnnnnnnnnnnnnnnnnnnnnnnnnnnnnnnnnnnnnnnnnnnnnnnnnnnnnnnnnnnnnnnnnnnnnnnnnnnnnnnnnnnnnnnnnnnnnnnnnnnnnnnnnnnnnnnnnnnnnnnnnnnnnnnnnnnnnnnnnnnnnnnnnnnnnnnnnnnnnnnnnnnnnnnnnnnnnnnnnnnnnnnnnnnnnnnnnnnnnnnnnnnnnnnnnnnnnnnnnnnnnnnnnnnnnnnnnnnnnnnnnnnnnnnnnnnnnnnnnnnnnnnnnnnnnnnnnnnnnnnnnnnnnnnnnnnnnnnnnnnnnnnnnnnnnnnnnnnnnnnnnnnnnnnnnnnnnnnnnnnnnnnnnnnnnnnnnnnnnnnnnnnnnnnnnnnnnnnnnnnnnnnnnnnnnnnnnnnnnnnnnnnnnnnnnnnnnnnnnnnnnnnnnnnnnnnnnnnnnnnnnnnnnnnnnnnnnnnnnnnnnnnnnnnnnnnnnnnnnnnnnnnnnnnnnnnnnnnnnnnnnnnnnnnnnnnnnnnnnnnnnnnnnnnnnnnnnnnnnnnnnnnnnnnnnnnnnnnnnnnnnnnnnnnnnnnnnnnnnnnnnnnnnnnnnnnnnnnnnnnnnnnnnnnnnnnnnnnnnnnnnnnnnnnnnnnnnnnnnnnnnnnnnnnnnnnnnnnnnnnnnnnnnnnnnnnnnnnnnnnnnnnnnnnnnnnnnnnnnnnnnnnnnnnnnnnnnnnnnnnnnnnnnnnnnnnnnnnnnnnnnnnnnnnnnnnnnnnnnnnnnnnnnnnnnnnnnnnnnnnnnnnnnnnnnnnnnnnnnnnnnnnnnnnnnnnnnnnnnnnnnnnnnnnnnnnnnnnnnnnnnnnnnnnnnnnnnnnnnnnnnnnnnnnnnnnnnnnnnnnnnnnnnnnnnnnnnnnnnnnnnnnnnnnnnnnnnnnnnnnnnnnnnnnnnnnnnnnnnnnnnnnnnnnnnnnnnnnnnnnnnnnnnnnnnnnnnnnnnnnnnnnnnnnnnnnnnnnnnnnnnnnnnnnnnnnnnnnnnnnnnnnnnnnnnnnnnnnnnnnnnnnnnnnnnnnnnnnnnnnnnnnnnnnnnnnnnnnnnnnnnnnnnnnnnnnnnnnnnnnnnnnnnnnnnnnnnnnnnnnnnnnnnnnnnnnnnnnnnnnnnnnnnnnnnnnnnnnnnnnnnnnnnnnnnnnnnnnnnnnnnnnnnnnnnnnnnnnnnnnnnnnnnnnnnnnnnnnnnnnnnnnnnnnnnnnnnnnnnnnnnnnnnnnnnnnnnnnnnnnnnnnnnnnnnnnnnnnnnnnnnnnnnnnnnnnnnnnnnnnnnnnnnnnnnnnnnnnnnnnnnnnnnnnnnnnnnnnnnnnnnnnnnnnnnnnnnnnnnnnnnnnnnnnnnnnnnnnnnnnnnnnnnnnnnnnnnnnnnnnnnnnnnnnnnnnnnnnnnnnnnnnnnnnnnnnnnnnnnnnnnnnnnnnnnnnnnnnnnnnnnnnnnnnnnnnnnnnnnnnnnnnnnnnnnnnnnnnnnnnnnnnnnnnnnnnnnnnnnnnnnnnnnnnnnnnnnnnnnnnnnnnnnnnnnnnnnnnnnnnnnnnnnnnnnnnnnnnnnnnnnnnnnnnnnnnnnnnnnnnnnnnnnnnnnnnnnnnnnnnnnnnnnnnnnnnnnnnnnnnnnnnnnnnnnnnnnnnnnnnnnnnnnnnnnnnnnnnnnnnnnnnnnnnnnnnnnnnnnnnnnnnnnnnnnnnnnnnnnnnnnnnnnnnnnnnnnnnnnnnnnnnnnnnnnnnnnnnnnnnnnnnnnnnnnnnnnnnnnnnnnnnnnnnnnnnnnnnnnnnnnnnnnnnnnnnnnnnnnnnnnnnnnnnnnnnnnnnnnnnnnnnnnnnnnnnnnnnnnnnnnnnnnnnnnnnnnnnnnnnnnnnnnnnnnnnnnnnnnnnnnnnnnnnnnnnnnnnnnnnnnnnnnnnnnnnnnnnnnnnnnnnnnnnnnnnnnnnnnnnnnnnnnnnnnnnnnnnnnnnnnnnnnnnnnnnnnnnnnnnnnnnnnnnnnnnnnnnnnnnnnnnnnnnnnnnnnnnnnnnnnnnnnnnnnnnnnnnnnnnnnnnnnnnnnnnnnnnnnnnnnnnnnnnnnnnnnnnnnnnnnnnnnnnnnnnnnnnnnnnnnnnnnnnnnnnnnnnnnnnnnnnnnnnnnnnnnnnnnnnnnnnnnnnnnnnnnnnnnnnnnnnnnnnnnnnnnnnnnnnnnnnnnnnnnnnnnnnnnnnnnnnnnnnnnnnnnnnnnnnnnnnnnnnnnnnnnnnnnnnnnnnnnnnnnnnnnnnnnnnnnnnnnnnnnnnnnnnnnnnnnnnnnnnnnnnnnnnnnnnnnnnnnnnnnnnnnnnnnnnnnnnnnnnnnnnnnnnnnnnnnnnnnnnnnnnnnnnnnnnnnnnnnnnnnnnnnnnnnnnnnnnnnnnnnnnnnnnnnnnnnnnnnnnnnnnnnnnnnnnnnnnnnnnnnnnnnnnnnnnnnnnnnnnnnnnnnnnnnnnnnnnnnnnnnnnnnnnnnnnnnnnnnnnnnnnnnnnnnnnnnnnnnnnnnnnnnnnnnnnnnnnnnnnnnnnnnnnnnnnnnnnnnnnnnnnnnnnnnnnnnnnnnnnnnnnnnnnnnnnnnnnnnnnnnnnnnnnnnnnnnnnnnnnnnnnnnnnnnnnnnnnnnnnnnnnnnnnnnnnnnnnnnnnnnnnnnnnnnnnnnnnnnnnnnnnnnnnnnnnnnnnnnnnnnnnnnnnnnnnnnnnnnnnnnnnnnnnnnnnnnnnnnnnnnnnnnnnnnnnnnnnnnnnnnnnnnnnnnnnnnnnnnnnnnnnnnnnnnnnnnnnnnnnnnnnnnnnnnnnnnnnnnnnnnnnnnnnnnnnnnnnnnnnnnnnnnnnnnnnnnnnnnnnnnnnnnnnnnnnnnnnnnnnnnnnnnnnnnnnnnnnnnnnnnnnnnnnnnnnnnnnnnnnnnnnnnnnnnnnnnnnnnnnnnnnnnnnnnnnnnnnnnnnnnnnnnnnnnnnnnnnnnnnnnnnnnnnnnnnnnnnnnnnnnnnnnnnnnnnnnnnnnnnnnnnnnnnnnnnnnnnnnnnnnnnnnnnnnnnnnnnnnnnnnnnnnnnnnnnnnnnnnnnnnnnnnnnnnnnnnnnnnnnnnnnnnnnnnnnnnnnnnnnnnnnnnnnnnnnnnnnnnnnnnnnnnnnnnnnnnnnnnnnnnnnnnnnnnnnnnnnnnnnnnnnnnnnnnnnnnnnnnnnnnnnnnnnnnnnnnnnnnnnnnnnnnnnnnnnnnnnnnnnnnnnnnnnnnnnnnnnnnnnnnnnnnnnnnnnnnnnnnnnnnnnnnnnnnnnnnnnnnnnnnnnnnnnnnnnnnnnnnnnnnnnnnnnnnnnnnnnnnnnnnnnnnnnnnnnnnnnnnnnnnnnnnnnnnnnnnnnnnnnnnnnnnnnnnnnnnnnnnnnnnnnnnnnnnnnnnnnnnnnnnnnnnnnnnnnnnnnnnnnnnnnnnnnnnnnnnnnnnnnnnnnnnnnnnnnnnnnnnnnnnnnnnnnnnnnnnnnnnnnnnnnnnnnnnnnnnnnnnnnnnnnnnnnnnnnnnnnnnnnnnnnnnnnnnnnnnnnnnnnnnnnnnnnnnnnnnnnnnnnnnnnnnnnnnnnnnnnnnnnnnnnnnnnnnnnnnnnnnnnnnnnnnnnnnnnnnnnnnnnnnnnnnnnnnnnnnnnnnnnnnnnnnnnnnnnnnnnnnnnnnnnnnnnnnnnnnnnnnnnnnnnnnnnnnnnnnnnnnnnnnnnnnnnnnnnnnnnnnnnnnnnnnnnnnnnnnnnnnnnnnnnnnnnnnnnnnnnnnnnnnnnnnnnnnnnnnnnnnnnnnnnnnnnnnnnnnnnnnnnnnnnnnnnnnnnnnnnnnnnnnnnnnnnnnnnnnnnnnnnnnnnnnnnnnnnnnnnnnnnnnnnnnnnnnnnnnnnnnnnnnnnnnnnnnnnnnnnnnnnnnnnnnnnnnnnnnnnnnnnnnnnnnnnnnnnnnnnnnnnnnnnnnnnnnnnnnnnnnnnnnnnnnnnnnnnnnnnnnnnnnnnnnnnnnnnnnnnnnnnnnnnnnnnnnnnnnnnnnnnnnnnnnnnnnnnnnnnnnnnnnnnnnnnnnnnnnnnnnnnnnnnnnnnnnnnnnnnnnnnnnnnnnnnnnnnnnnnnnnnnnnnnnnnnnnnnnnnnngtgcctgcaggtcctccacctccaagtgcgtgtagcgctgcgtggtagtgacccaggcatggcccaacagttcctgcactgcccgcaggttgggccgggcgcgcagggcgtgggtggcgaaggtgtgccgcagcaggtgcggcccggagcgatcggtgatgccggccgcccgcagataccgattcaccaacagcgcaatgccccgtaccgagaagcggtctccattgcggttcaggaagagcgctggctccgcatcatcccggtcggcgagataggccagcagcgcgtcggccgcagggcggttgatgggcagccgatggagccgccgccccttgcccaccacctggagtgcgctccagccttccgccggcaggcgcacgtcctcgcgactcagggcacacagctcccccacccgcagaccggtgttatagagcagcattaggatggcgtagtcgcgtcggcctatgggtgtcatggtgtcaggcaacgagagaagactttggacttcggcgacggtaaggtgcttgggtgccagcgccggacccaagcggatcgagcgcagggtctgggcggggttcttttccagtcggccctcctcgaagaggaagcggcagaaggagcgcgtcgccccaatggcgcggttgatgctcgacggggatcggccggcctgctgtcgtgcctgtggcagactcgccgtggcgagctggcggcggaaacactcccgcaggtccgccggccgcacttcgctaagcggcccaggcaatgacgccagcagtgcctgcagatccctgcggtaggccccgatcgaatgcggcgaccgcccctccagcgccagcgcccccaggaactcctctaaccactgctcgtttgaccgccgaccattctgctgcctcctcgccatcctgtcctctccctatggttagtgtcgaagtacttccgataagtctattgatcggatgcacaaggaagtcaaggcgattctgggtccggtagtacggcaagcaatcccaacaggagcccaaacgcggcgacagcgccaaccggccgccgaaagctcgacacgggcgcacgtggcgccgttcgtggccgtgtacggtgctccgcaggcgtccctgcaaaaggggtaatcagaaggaccaaacgtggggcacagggaaaacgtccggtgggggagcagttgcccaggatgctcatgggtgaccgcccgggaagggggttcctaccgtgcagcgtgaggccgttctcgcatgctgggcgaagacgcgtcgcggcacgccaggcttccacccgctggtctcccacatgctcgactctgcggcggtatgcggcgcgctcggcactcggccttgccgttcagctccctcgcccagccatactgctcctacatcgtagccctgcatgatattggcaaggccgaccccaggttccagaacaaggacgcggagcgagtcgctgccttgcggaccctcggactcacgttgtccgaccgcgtcgtagccttccgccacgagtcacgctcgttcgagtgggttcgggaaccccgctacccggcacacgaaccacatacgggaacgaggaagccatgaacgagagacccacaaactacaacctgctcgtagagcagtggatccccatcctgatgaccgatgggaagtgcggtcgcatcggcatcagggatgcgctgacgcaagcaggccggattcggcagatcgcagcgagcaaccccatggaccgtgtggcaatcctgcggttcctgctcgcgttgctgtattggtgcaagggaaacccggcggacgaaggcaggggaacttccggcgacgcattccctgcggattggtttctcaaactcaatgacaatgaagactgcttcaaccttctaggtgaggggaagcggttctatcaggatcgtgccgcacgaagaagccgggccgctacggatctcatccaggagattcctacgggcaataactactggcacttccggcactcgactgacaaggcggacggagtctgccacgcgtgctgcgccatggggctcctgcggttgccgctgttttccgtaagtggcctgcctgacctgaagtccggcatcaacggcacgccacccgtgtacgtcgtgccttggggtatgtcgctgctggagacgcttctggcaaactggtcgccatccatgctgcttggcgagccggcatggacccagccggatatccggccaactccgggtcaggatgtgcccctgctaacgggtttgacgctgctgtccagacgggtttggttggatgatcccgaacagtccggcacatgcgttggctgcggagcagtagagacgccagtcatacgaacgtgcatgttccagtcggctggcgaacagaagaacgcccagtggagcgatccccatgtcgtctattcgggcgagatgccacggagagcttcgaaagcagcagatctgacgacagcaggcaagttcaggatggatcgtccgtggcctgatctgcttgcccgcatgctcgaagcaggcaagttcggaccgggaaagcggtcagcagcgttccttatcgtcgggttcgccactgaccaagcaaagaacatcgacgtgtgggagcggcttattgccctgacttcatcggagctatccagggataccgcgacttcaatgatcctgcagtggcagaaacaagccagccaattggggaggcgcatctcggggtcgaagactgaggggaccgccgctctcgccgccgttcgcccccatgtcgaaggcagagtctccggcaaggtaggcgacctgcttgctggcgacgcaaacgcatgggatcgggctgcggcggaataccgccccatgatggatatgattgctcaatcgctttcccccggcttcacaacggccgcggttcaacggcgaaaggagattgcgaacgtgttgccagacatgcggccacaacccgaggcggcgaagaagactggccggaagaagggaggagacacgtgagccccacggagcagttcatccaggtcttgtccgagttgaggatcggtgatctcgggtcgctgcgcacgcacaccgggcaaggtctcgacgaatcggtagacgggttcgacctgttcgcgggtctctggtggccgttgcgtcagagaaacgagcgggcgccccgccgcgaggtggcctggctgatcgcgagactctacgccttctgtccggtctcgtattcgcctggcgacacgctcgcgcgccaactgcgcctctgccagcccaacaaggacccggcgagagagcgtttccggcagaggttcgataggatgctcatccttccgcttgaccagatcgagtcggcgctgcgatgggcgcttgacttggtcgcctcaagcggccgggcactcgactgggtgaaactgacggatgatctctccatctgggaacgcgaatccacccgcctcgagtgggcggaccagttcatcgggaacaacgaaaggggacaatgatgttgatcgaaatccacatgatccagaaccacagcccggccaatctgaatagcgacgatctgggcgcgcccaagacctgctacttcggcggggtcctgcgctcgcgcatctcaagccagtgcctcaaacgcagcatccgcatgagcgacgagttccagcagttgctcggcggcattcgcacccggcagttggcaagattggtcgcggagaaagtcactggcaagtccgacgtgaggaaacgcgcggagagaatcctcaaagcttgtggacttgagcctaagaaggcgagcaagcagaacgcggacgaagatgatcccagagactctgacaagagcaagatgcttgtgtacacgacccgccaggcggttgaggaaatggcaaggctcctgcagaatgacgcagggaagaccgatggcgtactggcggaggagttcgggaagctgatcactcaacacgtcgctgtgccagatatggcgcttagcggcaggatgcttgaaaccggtgtgctcaaagacacgaccgtggacgcggcgctgcaggtggcccacgcgatctcgacacacgaggcccgccccgaagtagactactatgtcgccgccgatgacattcctggtgacgatgcgggggcgggctacgtggacgaagccatgttcgcctcggcctgcttctacaagtactactcgatccactgggaagcgctggtcggaaacctgatgggcaacgaggaactggccgcgcacacggtcggcgcgttccttcgaggtgcggcgctggtcaatcccacaggcaagcagaacagcttcgccgctcacaatccccccgacgggatgctgatcgagattaggaacaccccgatcagctacgtgaacgccttcgccaggccagcggcccaaggcgaccgggacatcatctcgcagagcatcgcgcaattgggccagtacatccacgacctggacaccggatatggccagccgcaagagcggttctggttctcgcccaacctgcgctatccattgagggttgtagagaacaagcgggagatcgagctcgcagagaacaacatcaaggcgctcgacgatctcattcccgccgtgatcgctgcgatcggccatgactgggcaacggttcagaaggtcatcgtgaacccaggggcggccccatgagcgcgaacaccctgttcctccgccttgagggtccgcttcaggcatggggcgatcaggaatccaagtttgttatccggcggacggccgaggccccgaccaaatcgggggtgatcgggatgctatgcgcggcattgggcgtttcccgtccgcaggcccccggcgagtggcttccgaagctcagtgacctgcacatgggcgtgcgcatcgatcggcccggcgtgcgctggtgggactatcacacggtcggcgccagaatgcagatgcgcatcgccgaaggcgagggaaagaccaagcccggcgcgatgctcacccggcgcgagtatctctgcgacgcgagcttcctcgtcgccttgcagggcgaaccggctctcattgccgaactggaaacggcgatgggaaatccacgatggactctctacctcgggagaaagtcctgtcccccgtcccgccctctgctagagcatacctccgacgcttttcccgatctgctttcggccctcacatcggtcccttggcgccggcggctcgaagaggaccttccaccccaaaccgtgaactgcctgctcgactgggagccaacgtctgaacagcccgaagcgcccgacgatgcgcttgtctggtatgacgtgccgctgaccttcgagccgccggcccaccgcccccgattcgtcgtccgcaggcagttcgcagtaggtgcggacggcgaggtccgtatcgcggaaaggcccgcgcagaacccgactccacgaccgccgcgcccgcacgcagactaccggaacaccgagtatcgcaacgcccgcgccgcccgcctcaatgccgatcatggcctctgcgttttctgcaagtcccccgccacgaccgtgcaacacaccacctaccgccgggccggcggaggtgagtccccggacgacctgcgctccctttgccgcctgtgccacgacgcggtgaccacgatcgaatatggcctgggcatgggcatggaccgcatcaacccggaggagccgcgctggcgcgagaagatcatcaggaaacgcaaggagatcatcgagttccgttcgctggaaactcggcgtcggcgtctcgcccacgaggaggtcgaataggcatgtacctgtcctgcctcttgatcgatgtggggaagaaccccgaccgcccccgccctggacggctttggctgcgcaacctctaccacgttcatcagcggttgtgtatggcgtttccatcggcccccaaagtggccgatgatgggggctttctcaaacccttcaaaccgggagacttggaagagcaagtccacgtcgctcgggcgtcggatgcagggttcttgtttcgcgttgatccacaactcgggggtcgggccgtgatcctcgtgcaatctgctgtgaagcccgcctgggagtatgccttccgcaacgccggtcatttcctggccgaaccacccaaggtgaaggcgctggacctaagcttccgcattgcccaacgcctccgcttccatctgcgcgccaatccaaccgagcggcgcgttttcggcgagccgctcccaggccagaagccgtcgggcaagcgcatcggtgtccatggcgaagagatgcagcgagcctggcttgaccgcaaggccgctgagaacggttttcgcatcctctcatgcgtagtcaccgaccggggcttccaaaccagccgcaggtcccccggctcaccgcccatccgtcacctctgcgttgacttcgacggcatcctggaagtgaccgaaccagagctgttcctggatgcgttccagtcgggcatcggctcggcaaagggcttcggctttgggttgttgtctgtggcccgtgcttagcgcgcgctaagcacggtcaccataagtgcggaccttgacaactgaataatctccgaccatctcctgaggcaaaccgaggccggcggaacgcaggtacgtgtggtgccttgtagcccgactgcggaacaaccacagcaagatatgcagtagggagggtgggaatggacgacttgcatcagctccccaagttccgcgacgctctttccttcctctatctggagcatgtgcggatagagcaggaggagaagtccatcgctttctgggacgccgagggcaagacgccggttccagtggcagggctttccgtgctcatgctagggcccggcaccaacatcacccatgccgccattcgggcccttgctgacaacaactgcctcgtcatctggtgcggcgagcagaacgtccgcttctactcctttggcatgggcgggacccgatccagcgcggcgctgcttcgccaggcgcgcctggtaggcgatgaggggcttcgacttgaggtcgtgaagaggatgtaccggatgcggttccgggagaagctgccggccgacctcactgttcagcaatttcgcggcatggaaggaatccgggtgcgcgaagcctacgcccgcgccagccgcgagacaggcgttccctggagtggacgcagctatgaccgaaaggactgacgctctaccgaccccgtgaatcgcgccctttcggcggccaactcctgcctttacggcgtctgtcatgctgccattctctctattggatacagcccggcactcggcttcatccacaccggcaagcagctttcgttcgtgtatgacatcgccgatctctacaaggtcgaactcaccattcctctggcgtttcggacgaccgccgagaacccgcaggacctcgagcggcacgtgcggctccagtgtcgcgacgtgttccgcgagagccgcctcattcagcggataatccctgacatccgccaggcgctcggggatggtggcgaggaggaggagttcgtccccgacgaggaccctgcgctgccgatcgagctgtggacgccgaccgccgaactcaacgctgcctctgacggcgaacaagcgccgggagccgacgaggaggcgtctccatggtcgtgatgatactggaaagcgtgcccccgagcctgcgcggcgagatcacgcgctggatgatccagcccaaagccggggtgtttgcgggcaaggtttcggcaatggtccgagacaagctctgggataaggttcgtcgcgcagccaaaggcggcagcgggattctgcttcacgcgagcaacacggaacagggattcgccgtgaggacctttggagaccctagcagagagctgctggacatacagggtatcgtcttggccaggatgccccagaagggctgaaatggcagggtgttccccacgcgtgtgggggtgaaccgtggaaccccagaccgtgctgaggcgaggtgtggtgttccccacgcgtgtgggggtgaaccggaggtcaacatgaagaggatgctggtcgtagtgtgttccccacgcacgtgggggtggaccggcacaggggggtgttggatgacttcacgatgcctgttccccacgcacgtgggggtggaccgcaatgaagatcacccccgacccgaagtgctcggtgttccccacgcgtgtgggggtggaccgctctgggatacgaccgacccgaacatggtcacgtgttccccacgcacgtgggggtgaaccgtgtcggcgctcccgccgggcctcgcgcttgatgtgctccccacgcgtgtgggggtgaaccgtcggactcggtcaccatgacggcggaggccggtatcccatgcgcatactgggaaactctgcgatactacttggcggatcatctcccaagttgcatgtcatgatcggcggggctatcatcaccatgaggcatacctcatgcgaggatctgcacacagcaaggtcgcgttcgccggcaccgtcaccgcggtgaaagcacgcatccggctgcttcgctcgttcgaccaggtcagccatgcttacctggggtacacgctggtcctcgacggcacagtggacggggttgttgtggacgacctacgagtggccgtcggccccaaagcccacgaaacccaccgtttccggatcatggaccagctccaggggatggcggaaccagtaccggacccggatcaggaatgggccacccactacaaggcgagcggactgcggttgctccagcggtgcccagccgagcaggaggtgccagcgaacccggaaggcggcattgcacccccgcttcccgaataccgctcccggggtcacctccgtcttgacaccacgcggtaccgtgctcagtgccagcgctgtccgttcgggctagtgatgccgaccgagatcacaatcgaccagtggaacccctcgaagaagaggtggcgattcgagacgcattgctatggtccgcgcgactgccccaggtacacgccgggaaagccgtaccgagtgcagggccggaagtcgtggatggtgtgggcggacgacgatgtcgagcgcgcggctgcggacgaggagtggcggaaggggcacgcagaggatggcagtcgctaacggcccagtctggtaccggcttcgccggtgagtccggtatcccgagcacccccgactccggccaccccctcggctggtgtcactgtccggggttccgtcgtgggtcgtcgaccgacggctctctccagacaggcgggtcaccgcgcttcggttggcggcgtgatgtcaggtcggcttcacgggcccttgacgtcgacagatggctttacgccaggtcacggcattccgctggcggcgttgtagttagccggccgaacgggcccgtgacagggacaggcgcgctcagaccccgtagcgccccgtcaccgctagtgagcccgtcctgcgtgtggtatcatccagttcggccgacgaattgcagcattgaggccacgtgtctggagaggataaggcgaagtgcaccagcctctgctgggcgtaaggatcataaaggcaggcgccgtcttcttcatagcacttgtcgtgctggcgacgactggcgcggctgaggagcaggtcaattggcggcgagtcgtccacgcgttggagggaagagacctgggccagatccaggagctctgcccggggtctgtcgagcacctctccctcgatcagcggaacgccatcgcgctggcggccgccaagtccctgagtatcgcccaatacatagatgcgatcggggaaagcaggctctgggagcacttcaccacacctccggccgaggattccccgcgcgaggccgagtgtcgaagacagtgggggatcaacatggccgccgctgagctcctgcgacacctggccgagaaacgattgatcaatgacccacgggtgctgccctatctgatcgaggctctggaccatcccgaccggttctccgtgggccagaagtgcttctatgccctcggttacctgacacggcatacgtcgggggaggtctactgggcacggcttgttgaggacgagaagcggcacaaggaggtagttctgtggtggcagggatggtggagcaagaacaggggcagacaccccgtattcgatgccgaggtggagcgacgagcccgagctgaggtcatccgcgtggcccgccagatcgagagggaggtgaagcctcatcgtgctgagttgtcgctcttctcgctccccaagaacttggtgctgcgctggcctcgcctcttattcgagatcgagtataacccgcggctctggtctctggcccctccgctgaacgtcgatcgcgacagcttgccgtgggttcatatctcctgccggttccagagcgaggacctccccgcggaggctccatgggcggcgaaggagactcccactccccccggggaactcagagaacccgtgagggcagtgtacttccgggctctcgaggggacggatatcgtggtcgaggtccttgcggcgtcaaaggacgaagggttgatcgccgcattgtgcgcggcactggacgccagacgcagcgtggcaccacatgtgggtgtcacccgcccgtgaggtcggcatgcggtcacccccgactccggctactccctaggctgggagtcactgacggggtcgcgtcgcccaccaccgagcgacggctcttccccgacacgcgagtcagagcattctggttggcggcatgatgctaggccggctgcgcaggcccctgacaaggacaggcgaagctgggatgaagctgaaccagtatcgggccgagcttgtctcccagccgggagatcacgtcggtgaaggccgtgacctgctcgtcggccccctccagcatcttctcgtgggtgatctcgccaggcagcttggggcagaagaggaatccctgaggagtgcgttcacgccatgcctccacagactttgccgagggtatccggtagtaggtgctgtcgatctcgaccgcgtcgaactggctggcgtagtaggccagctcatccttggtgccgggagggtagaacgtccccttccagtcgcggaaggaccagccgcaggttcc

SEQ ID NO: 1031 - DNA, 103923 bp, Artificial Sequence
  Synthetic Oligonucleotide
  misc_feature (1)..(92903): n is a, c, g, or t
nnnnnnnnnnnnnnnnnnnnnnnnnnnnnnnnnnnnnnnnnnnnnnnnnnnnnnnnnnnnnnnnnnnnnnnnnnnnnnnnnnnnnnnnnnnnnnnnnnnnnnnnnnnnnnnnnnnnnnnnnnnnnnnnnnnnnnnnnnnnnnnnnnnnnnnnnnnnnnnnnnnnnnnnnnnnnnnnnnnnnnnnnnnnnnnnnnnnnnnnnnnnnnnnnnnnnnnnnnnnnnnnnnnnnnnnnnnnnnnnnnnnnnnnnnnnnnnnnnnnnnnnnnnnnnnnnnnnnnnnnnnnnnnnnnnnnnnnnnnnnnnnnnnnnnnnnnnnnnnnnnnnnnnnnnnnnnnnnnnnnnnnnnnnnnnnnnnnnnnnnnnnnnnnnnnnnnnnnnnnnnnnnnnnnnnnnnnnnnnnnnnnnnnnnnnnnnnnnnnnnnnnnnnnnnnnnnnnnnnnnnnnnnnnnnnnnnnnnnnnnnnnnnnnnnnnnnnnnnnnnnnnnnnnnnnnnnnnnnnnnnnnnnnnnnnnnnnnnnnnnnnnnnnnnnnnnnnnnnnnnnnnnnnnnnnnnnnnnnnnnnnnnnnnnnnnnnnnnnnnnnnnnnnnnnnnnnnnnnnnnnnnnnnnnnnnnnnnnnnnnnnnnnnnnnnnnnnnnnnnnnnnnnnnnnnnnnnnnnnnnnnnnnnnnnnnnnnnnnnnnnnnnnnnnnnnnnnnnnnnnnnnnnnnnnnnnnnnnnnnnnnnnnnnnnnnnnnnnnnnnnnnnnnnnnnnnnnnnnnnnnnnnnnnnnnnnnnnnnnnnnnnnnnnnnnnnnnnnnnnnnnnnnnnnnnnnnnnnnnnnnnnnnnnnnnnnnnnnnnnnnnnnnnnnnnnnnnnnnnnnnnnnnnnnnnnnnnnnnnnnnnnnnnnnnnnnnnnnnnnnnnnnnnnnnnnnnnnnnnnnnnnnnnnnnnnnnnnnnnnnnnnnnnnnnnnnnnnnnnnnnnnnnnnnnnnnnnnnnnnnnnnnnnnnnnnnnnnnnnnnnnnnnnnnnnnnnnnnnnnnnnnnnnnnnnnnnnnnnnnnnnnnnnnnnnnnnnnnnnnnnnnnnnnnnnnnnnnnnnnnnnnnnnnnnnnnnnnnnnnnnnnnnnnnnnnnnnnnnnnnnnnnnnnnnnnnnnnnnnnnnnnnnnnnnnnnnnnnnnnnnnnnnnnnnnnnnnnnnnnnnnnnnnnnnnnnnnnnnnnnnnnnnnnnnnnnnnnnnnnnnnnnnnnnnnnnnnnnnnnnnnnnnnnnnnnnnnnnnnnnnnnnnnnnnnnnnnnnnnnnnnnnnnnnnnnnnnnnnnnnnnnnnnnnnnnnnnnnnnnnnnnnnnnnnnnnnnnnnnnnnnnnnnnnnnnnnnnnnnnnnnnnnnnnnnnnnnnnnnnnnnnnnnnnnnnnnnnnnnnnnnnnnnnnnnnnnnnnnnnnnnnnnnnnnnnnnnnnnnnnnnnnnnnnnnnnnnnnnnnnnnnnnnnnnnnnnnnnnnnnnnnnnnnnnnnnnnnnnnnnnnnnnnnnnnnnnnnnnnnnnnnnnnnnnnnnnnnnnnnnnnnnnnnnnnnnnnnnnnnnnnnnnnnnnnnnnnnnnnnnnnnnnnnnnnnnnnnnnnnnnnnnnnnnnnnnnnnnnnnnnnnnnnnnnnnnnnnnnnnnnnnnnnnnnnnnnnnnnnnnnnnnnnnnnnnnnnnnnnnnnnnnnnnnnnnnnnnnnnnnnnnnnnnnnnnnnnnnnnnnnnnnnnnnnnnnnnnnnnnnnnnnnnnnnnnnnnnnnnnnnnnnnnnnnnnnnnnnnnnnnnnnnnnnnnnnnnnnnnnnnnnnnnnnnnnnnnnnnnnnnnnnnnnnnnnnnnnnnnnnnnnnnnnnnnnnnnnnnnnnnnnnnnnnnnnnnnnnnnnnnnnnnnnnnnnnnnnnnnnnnnnnnnnnnnnnnnnnnnnnnnnnnnnnnnnnnnnnnnnnnnnnnnnnnnnnnnnnnnnnnnnnnnnnnnnnnnnnnnnnnnnnnnnnnnnnnnnnnnnnnnnnnnnnnnnnnnnnnnnnnnnnnnnnnnnnnnnnnnnnnnnnnnnnnnnnnnnnnnnnnnnnnnnnnnnnnnnnnnnnnnnnnnnnnnnnnnnnnnnnnnnnnnnnnnnnnnnnnnnnnnnnnnnnnnnnnnnnnnnnnnnnnnnnnnnnnnnnnnnnnnnnnnnnnnnnnnnnnnnnnnnnnnnnnnnnnnnnnnnnnnnnnnnnnnnnnnnnnnnnnnnnnnnnnnnnnnnnnnnnnnnnnnnnnnnnnnnnnnnnnnnnnnnnnnnnnnnnnnnnnnnnnnnnnnnnnnnnnnnnnnnnnnnnnnnnnnnnnnnnnnnnnnnnnnnnnnnnnnnnnnnnnnnnnnnnnnnnnnnnnnnnnnnnnnnnnnnnnnnnnnnnnnnnnnnnnnnnnnnnnnnnnnnnnnnnnnnnnnnnnnnnnnnnnnnnnnnnnnnnnnnnnnnnnnnnnnnnnnnnnnnnnnnnnnnnnnnnnnnnnnnnnnnnnnnnnnnnnnnnnnnnnnnnnnnnnnnnnnnnnnnnnnnnnnnnnnnnnnnnnnnnnnnnnnnnnnnnnnnnnnnnnnnnnnnnnnnnnnnnnnnnnnnnnnnnnnnnnnnnnnnnnnnnnnnnnnnnnnnnnnnnnnnnnnnnnnnnnnnnnnnnnnnnnnnnnnnnnnnnnnnnnnnnnnnnnnnnnnnnnnnnnnnnnnnnnnnnnnnnnnnnnnnnnnnnnnnnnnnnnnnnnnnnnnnnnnnnnnnnnnnnnnnnnnnnnnnnnnnnnnnnnnnnnnnnnnnnnnnnnnnnnnnnnnnnnnnnnnnnnnnnnnnnnnnnnnnnnnnnnnnnnnnnnnnnnnnnnnnnnnnnnnnnnnnnnnnnnnnnnnnnnnnnnnnnnnnnnnnnnnnnnnnnnnnnnnnnnnnnnnnnnnnnnnnnnnnnnnnnnnnnnnnnnnnnnnnnnnnnnnnnnnnnnnnnnnnnnnnnnnnnnnnnnnnnnnnnnnnnnnnnnnnnnnnnnnnnnnnnnnnnnnnnnnnnnnnnnnnnnnnnnnnnnnnnnnnnnnnnnnnnnnnnnnnnnnnnnnnnnnnnnnnnnnnnnnnnnnnnnnnnnnnnnnnnnnnnnnnnnnnnnnnnnnnnnnnnnnnnnnnnnnnnnnnnnnnnnnnnnnnnnnnnnnnnnnnnnnnnnnnnnnnnnnnnnnnnnnnnnnnnnnnnnnnnnnnnnnnnnnnnnnnnnnnnnnnnnnnnnnnnnnnnnnnnnnnnnnnnnnnnnnnnnnnnnnnnnnnnnnnnnnnnnnnnnnnnnnnnnnnnnnnnnnnnnnnnnnnnnnnnnnnnnnnnnnnnnnnnnnnnnnnnnnnnnnnnnnnnnnnnnnnnnnnnnnnnnnnnnnnnnnnnnnnnnnnnnnnnnnnnnnnnnnnnnnnnnnnnnnnnnnnnnnnnnnnnnnnnnnnnnnnnnnnnnnnnnnnnnnnnnnnnnnnnnnnnnnnnnnnnnnnnnnnnnnnnnnnnnnnnnnnnnnnnnnnnnnnnnnnnnnnnnnnnnnnnnnnnnnnnnnnnnnnnnnnnnnnnnnnnnnnnnnnnnnnnnnnnnnnnnnnnnnnnnnnnnnnnnnnnnnnnnnnnnnnnnnnnnnnnnnnnnnnnnnnnnnnnnnnnnnnnnnnnnnnnnnnnnnnnnnnnnnnnnnnnnnnnnnnnnnnnnnnnnnnnnnnnnnnnnnnnnnnnnnnnnnnnnnnnnnnnnnnnnnnnnnnnnnnnnnnnnnnnnnnnnnnnnnnnnnnnnnnnnnnnnnnnnnnnnnnnnnnnnnnnnnnnnnnnnnnnnnnnnnnnnnnnnnnnnnnnnnnnnnnnnnnnnnnnnnnnnnnnnnnnnnnnnnnnnnnnnnnnnnnnnnnnnnnnnnnnnnnnnnnnnnnnnnnnnnnnnnnnnnnnnnnnnnnnnnnnnnnnnnnnnnnnnnnnnnnnnnnnnnnnnnnnnnnnnnnnnnnnnnnnnnnnnnnnnnnnnnnnnnnnnnnnnnnnnnnnnnnnnnnnnnnnnnnnnnnnnnnnnnnnnnnnnnnnnnnnnnnnnnnnnnnnnnnnnnnnnnnnnnnnnnnnnnnnnnnnnnnnnnnnnnnnnnnnnnnnnnnnnnnnnnnnnnnnnnnnnnnnnnnnnnnnnnnnnnnnnnnnnnnnnnnnnnnnnnnnnnnnnnnnnnnnnnnnnnnnnnnnnnnnnnnnnnnnnnnnnnnnnnnnnnnnnnnnnnnnnnnnnnnnnnnnnnnnnnnnnnnnnnnnnnnnnnnnnnnnnnnnnnnnnnnnnnnnnnnnnnnnnnnnnnnnnnnnnnnnnnnnnnnnnnnnnnnnnnnnnnnnnnnnnnnnnnnnnnnnnnnnnnnnnnnnnnnnnnnnnnnnnnnnnnnnnnnnnnnnnnnnnnnnnnnnnnnnnnnnnnnnnnnnnnnnnnnnnnnnnnnnnnnnnnnnnnnnnnnnnnnnnnnnnnnnnnnnnnnnnnnnnnnnnnnnnnnnnnnnnnnnnnnnnnnnnnnnnnnnnnnnnnnnnnnnnnnnnnnnnnnnnnnnnnnnnnnnnnnnnnnnnnnnnnnnnnnnnnnnnnnnnnnnnnnnnnnnnnnnnnnnnnnnnnnnnnnnnnnnnnnnnnnnnnnnnnnnnnnnnnnnnnnnnnnnnnnnnnnnnnnnnnnnnnnnnnnnnnnnnnnnnnnnnnnnnnnnnnnnnnnnnnnnnnnnnnnnnnnnnnnnnnnnnnnnnnnnnnnnnnnnnnnnnnnnnnnnnnnnnnnnnnnnnnnnnnnnnnnnnnnnnnnnnnnnnnnnnnnnnnnnnnnnnnnnnnnnnnnnnnnnnnnnnnnnnnnnnnnnnnnnnnnnnnnnnnnnnnnnnnnnnnnnnnnnnnnnnnnnnnnnnnnnnnnnnnnnnnnnnnnnnnnnnnnnnnnnnnnnnnnnnnnnnnnnnnnnnnnnnnnnnnnnnnnnnnnnnnnnnnnnnnnnnnnnnnnnnnnnnnnnnnnnnnnnnnnnnnnnnnnnnnnnnnnnnnnnnnnnnnnnnnnnnnnnnnnnnnnnnnnnnnnnnnnnnnnnnnnnnnnnnnnnnnnnnnnnnnnnnnnnnnnnnnnnnnnnnnnnnnnnnnnnnnnnnnnnnnnnnnnnnnnnnnnnnnnnnnnnnnnnnnnnnnnnnnnnnnnnnnnnnnnnnnnnnnnnnnnnnnnnnnnnnnnnnnnnnnnnnnnnnnnnnnnnnnnnnnnnnnnnnnnnnnnnnnnnnnnnnnnnnnnnnnnnnnnnnnnnnnnnnnnnnnnnnnnnnnnnnnnnnnnnnnnnnnnnnnnnnnnnnnnnnnnnnnnnnnnnnnnnnnnnnnnnnnnnnnnnnnnnnnnnnnnnnnnnnnnnnnnnnnnnnnnnnnnnnnnnnnnnnnnnnnnnnnnnnnnnnnnnnnnnnnnnnnnnnnnnnnnnnnnnnnnnnnnnnnnnnnnnnnnnnnnnnnnnnnnnnnnnnnnnnnnnnnnnnnnnnnnnnnnnnnnnnnnnnnnnnnnnnnnnnnnnnnnnnnnnnnnnnnnnnnnnnnnnnnnnnnnnnnnnnnnnnnnnnnnnnnnnnnnnnnnnnnnnnnnnnnnnnnnnnnnnnnnnnnnnnnnnnnnnnnnnnnnnnnnnnnnnnnnnnnnnnnnnnnnnnnnnnnnnnnnnnnnnnnnnnnnnnnnnnnnnnnnnnnnnnnnnnnnnnnnnnnnnnnnnnnnnnnnnnnnnnnnnnnnnnnnnnnnnnnnnnnnnnnnnnnnnnnnnnnnnnnnnnnnnnnnnnnnnnnnnnnnnnnnnnnnnnnnnnnnnnnnnnnnnnnnnnnnnnnnnnnnnnnnnnnnnnnnnnnnnnnnnnnnnnnnnnnnnnnnnnnnnnnnnnnnnnnnnnnnnnnnnnnnnnnnnnnnnnnnnnnnnnnnnnnnnnnnnnnnnnnnnnnnnnnnnnnnnnnnnnnnnnnnnnnnnnnnnnnnnnnnnnnnnnnnnnnnnnnnnnnnnnnnnnnnnnnnnnnnnnnnnnnnnnnnnnnnnnnnnnnnnnnnnnnnnnnnnnnnnnnnnnnnnnnnnnnnnnnnnnnnnnnnnnnnnnnnnnnnnnnnnnnnnnnnnnnnnnnnnnnnnnnnnnnnnnnnnnnnnnnnnnnnnnnnnnnnnnnnnnnnnnnnnnnnnnnnnnnnnnnnnnnnnnnnnnnnnnnnnnnnnnnnnnnnnnnnnnnnnnnnnnnnnnnnnnnnnnnnnnnnnnnnnnnnnnnnnnnnnnnnnnnnnnnnnnnnnnnnnnnnnnnnnnnnnnnnnnnnnnnnnnnnnnnnnnnnnnnnnnnnnnnnnnnnnnnnnnnnnnnnnnnnnnnnnnnnnnnnnnnnnnnnnnnnnnnnnnnnnnnnnnnnnnnnnnnnnnnnnnnnnnnnnnnnnnnnnnnnnnnnnnnnnnnnnnnnnnnnnnnnnnnnnnnnnnnnnnnnnnnnnnnnnnnnnnnnnnnnnnnnnnnnnnnnnnnnnnnnnnnnnnnnnnnnnnnnnnnnnnnnnnnnnnnnnnnnnnnnnnnnnnnnnnnnnnnnnnnnnnnnnnnnnnnnnnnnnnnnnnnnnnnnnnnnnnnnnnnnnnnnnnnnnnnnnnnnnnnnnnnnnnnnnnnnnnnnnnnnnnnnnnnnnnnnnnnnnnnnnnnnnnnnnnnnnnnnnnnnnnnnnnnnnnnnnnnnnnnnnnnnnnnnnnnnnnnnnnnnnnnnnnnnnnnnnnnnnnnnnnnnnnnnnnnnnnnnnnnnnnnnnnnnnnnnnnnnnnnnnnnnnnnnnnnnnnnnnnnnnnnnnnnnnnnnnnnnnnnnnnnnnnnnnnnnnnnnnnnnnnnnnnnnnnnnnnnnnnnnnnnnnnnnnnnnnnnnnnnnnnnnnnnnnnnnnnnnnnnnnnnnnnnnnnnnnnnnnnnnnnnnnnnnnnnnnnnnnnnnnnnnnnnnnnnnnnnnnnnnnnnnnnnnnnnnnnnnnnnnnnnnnnnnnnnnnnnnnnnnnnnnnnnnnnnnnnnnnnnnnnnnnnnnnnnnnnnnnnnnnnnnnnnnnnnnnnnnnnnnnnnnnnnnnnnnnnnnnnnnnnnnnnnnnnnnnnnnnnnnnnnnnnnnnnnnnnnnnnnnnnnnnnnnnnnnnnnnnnnnnnnnnnnnnnnnnnnnnnnnnnnnnnnnnnnnnnnnnnnnnnnnnnnnnnnnnnnnnnnnnnnnnnnnnnnnnnnnnnnnnnnnnnnnnnnnnnnnnnnnnnnnnnnnnnnnnnnnnnnnnnnnnnnnnnnnnnnnnnnnnnnnnnnnnnnnnnnnnnnnnnnnnnnnnnnnnnnnnnnnnnnnnnnnnnnnnnnnnnnnnnnnnnnnnnnnnnnnnnnnnnnnnnnnnnnnnnnnnnnnnnnnnnnnnnnnnnnnnnnnnnnnnnnnnnnnnnnnnnnnnnnnnnnnnnnnnnnnnnnnnnnnnnnnnnnnnnnnnnnnnnnnnnnnnnnnnnnnnnnnnnnnnnnnnnnnnnnnnnnnnnnnnnnnnnnnnnnnnnnnnnnnnnnnnnnnnnnnnnnnnnnnnnnnnnnnnnnnnnnnnnnnnnnnnnnnnnnnnnnnnnnnnnnnnnnnnnnnnnnnnnnnnnnnnnnnnnnnnnnnnnnnnnnnnnnnnnnnnnnnnnnnnnnnnnnnnnnnnnnnnnnnnnnnnnnnnnnnnnnnnnnnnnnnnnnnnnnnnnnnnnnnnnnnnnnnnnnnnnnnnnnnnnnnnnnnnnnnnnnnnnnnnnnnnnnnnnnnnnnnnnnnnnnnnnnnnnnnnnnnnnnnnnnnnnnnnnnnnnnnnnnnnnnnnnnnnnnnnnnnnnnnnnnnnnnnnnnnnnnnnnnnnnnnnnnnnnnnnnnnnnnnnnnnnnnnnnnnnnnnnnnnnnnnnnnnnnnnnnnnnnnnnnnnnnnnnnnnnnnnnnnnnnnnnnnnnnnnnnnnnnnnnnnnnnnnnnnnnnnnnnnnnnnnnnnnnnnnnnnnnnnnnnnnnnnnnnnnnnnnnnnnnnnnnnnnnnnnnnnnnnnnnnnnnnnnnnnnnnnnnnnnnnnnnnnnnnnnnnnnnnnnnnnnnnnnnnnnnnnnnnnnnnnnnnnnnnnnnnnnnnnnnnnnnnnnnnnnnnnnnnnnnnnnnnnnnnnnnnnnnnnnnnnnnnnnnnnnnnnnnnnnnnnnnnnnnnnnnnnnnnnnnnnnnnnnnnnnnnnnnnnnnnnnnnnnnnnnnnnnnnnnnnnnnnnnnnnnnnnnnnnnnnnnnnnnnnnnnnnnnnnnnnnnnnnnnnnnnnnnnnnnnnnnnnnnnnnnnnnnnnnnnnnnnnnnnnnnnnnnnnnnnnnnnnnnnnnnnnnnnnnnnnnnnnnnnnnnnnnnnnnnnnnnnnnnnnnnnnnnnnnnnnnnnnnnnnnnnnnnnnnnnnnnnnnnnnnnnnnnnnnnnnnnnnnnnnnnnnnnnnnnnnnnnnnnnnnnnnnnnnnnnnnnnnnnnnnnnnnnnnnnnnnnnnnnnnnnnnnnnnnnnnnnnnnnnnnnnnnnnnnnnnnnnnnnnnnnnnnnnnnnnnnnnnnnnnnnnnnnnnnnnnnnnnnnnnnnnnnnnnnnnnnnnnnnnnnnnnnnnnnnnnnnnnnnnnnnnnnnnnnnnnnnnnnnnnnnnnnnnnnnnnnnnnnnnnnnnnnnnnnnnnnnnnnnnnnnnnnnnnnnnnnnnnnnnnnnnnnnnnnnnnnnnnnnnnnnnnnnnnnnnnnnnnnnnnnnnnnnnnnnnnnnnnnnnnnnnnnnnnnnnnnnnnnnnnnnnnnnnnnnnnnnnnnnnnnnnnnnnnnnnnnnnnnnnnnnnnnnnnnnnnnnnnnnnnnnnnnnnnnnnnnnnnnnnnnnnnnnnnnnnnnnnnnnnnnnnnnnnnnnnnnnnnnnnnnnnnnnnnnnnnnnnnnnnnnnnnnnnnnnnnnnnnnnnnnnnnnnnnnnnnnnnnnnnnnnnnnnnnnnnnnnnnnnnnnnnnnnnnnnnnnnnnnnnnnnnnnnnnnnnnnnnnnnnnnnnnnnnnnnnnnnnnnnnnnnnnnnnnnnnnnnnnnnnnnnnnnnnnnnnnnnnnnnnnnnnnnnnnnnnnnnnnnnnnnnnnnnnnnnnnnnnnnnnnnnnnnnnnnnnnnnnnnnnnnnnnnnnnnnnnnnnnnnnnnnnnnnnnnnnnnnnnnnnnnnnnnnnnnnnnnnnnnnnnnnnnnnnnnnnnnnnnnnnnnnnnnnnnnnnnnnnnnnnnnnnnnnnnnnnnnnnnnnnnnnnnnnnnnnnnnnnnnnnnnnnnnnnnnnnnnnnnnnnnnnnnnnnnnnnnnnnnnnnnnnnnnnnnnnnnnnnnnnnnnnnnnnnnnnnnnnnnnnnnnnnnnnnnnnnnnnnnnnnnnnnnnnnnnnnnnnnnnnnnnnnnnnnnnnnnnnnnnnnnnnnnnnnnnnnnnnnnnnnnnnnnnnnnnnnnnnnnnnnnnnnnnnnnnnnnnnnnnnnnnnnnnnnnnnnnnnnnnnnnnnnnnnnnnnnnnnnnnnnnnnnnnnnnnnnnnnnnnnnnnnnnnnnnnnnnnnnnnnnnnnnnnnnnnnnnnnnnnnnnnnnnnnnnnnnnnnnnnnnnnnnnnnnnnnnnnnnnnnnnnnnnnnnnnnnnnnnnnnnnnnnnnnnnnnnnnnnnnnnnnnnnnnnnnnnnnnnnnnnnnnnnnnnnnnnnnnnnnnnnnnnnnnnnnnnnnnnnnnnnnnnnnnnnnnnnnnnnnnnnnnnnnnnnnnnnnnnnnnnnnnnnnnnnnnnnnnnnnnnnnnnnnnnnnnnnnnnnnnnnnnnnnnnnnnnnnnnnnnnnnnnnnnnnnnnnnnnnnnnnnnnnnnnnnnnnnnnnnnnnnnnnnnnnnnnnnnnnnnnnnnnnnnnnnnnnnnnnnnnnnnnnnnnnnnnnnnnnnnnnnnnnnnnnnnnnnnnnnnnnnnnnnnnnnnnnnnnnnnnnnnnnnnnnnnnnnnnnnnnnnnnnnnnnnnnnnnnnnnnnnnnnnnnnnnnnnnnnnnnnnnnnnnnnnnnnnnnnnnnnnnnnnnnnnnnnnnnnnnnnnnnnnnnnnnnnnnnnnnnnnnnnnnnnnnnnnnnnnnnnnnnnnnnnnnnnnnnnnnnnnnnnnnnnnnnnnnnnnnnnnnnnnnnnnnnnnnnnnnnnnnnnnnnnnnnnnnnnnnnnnnnnnnnnnnnnnnnnnnnnnnnnnnnnnnnnnnnnnnnnnnnnnnnnnnnnnnnnnnnnnnnnnnnnnnnnnnnnnnnnnnnnnnnnnnnnnnnnnnnnnnnnnnnnnnnnnnnnnnnnnnnnnnnnnnnnnnnnnnnnnnnnnnnnnnnnnnnnnnnnnnnnnnnnnnnnnnnnnnnnnnnnnnnnnnnnnnnnnnnnnnnnnnnnnnnnnnnnnnnnnnnnnnnnnnnnnnnnnnnnnnnnnnnnnnnnnnnnnnnnnnnnnnnnnnnnnnnnnnnnnnnnnnnnnnnnnnnnnnnnnnnnnnnnnnnnnnnnnnnnnnnnnnnnnnnnnnnnnnnnnnnnnnnnnnnnnnnnnnnnnnnnnnnnnnnnnnnnnnnnnnnnnnnnnnnnnnnnnnnnnnnnnnnnnnnnnnnnnnnnnnnnnnnnnnnnnnnnnnnnnnnnnnnnnnnnnnnnnnnnnnnnnnnnnnnnnnnnnnnnnnnnnnnnnnnnnnnnnnnnnnnnnnnnnnnnnnnnnnnnnnnnnnnnnnnnnnnnnnnnnnnnnnnnnnnnnnnnnnnnnnnnnnnnnnnnnnnnnnnnnnnnnnnnnnnnnnnnnnnnnnnnnnnnnnnnnnnnnnnnnnnnnnnnnnnnnnnnnnnnnnnnnnnnnnnnnnnnnnnnnnnnnnnnnnnnnnnnnnnnnnnnnnnnnnnnnnnnnnnnnnnnnnnnnnnnnnnnnnnnnnnnnnnnnnnnnnnnnnnnnnnnnnnnnnnnnnnnnnnnnnnnnnnnnnnnnnnnnnnnnnnnnnnnnnnnnnnnnnnnnnnnnnnnnnnnnnnnnnnnnnnnnnnnnnnnnnnnnnnnnnnnnnnnnnnnnnnnnnnnnnnnnnnnnnnnnnnnnnnnnnnnnnnnnnnnnnnnnnnnnnnnnnnnnnnnnnnnnnnnnnnnnnnnnnnnnnnnnnnnnnnnnnnnnnnnnnnnnnnnnnnnnnnnnnnnnnnnnnnnnnnnnnnnnnnnnnnnnnnnnnnnnnnnnnnnnnnnnnnnnnnnnnnnnnnnnnnnnnnnnnnnnnnnnnnnnnnnnnnnnnnnnnnnnnnnnnnnnnnnnnnnnnnnnnnnnnnnnnnnnnnnnnnnnnnnnnnnnnnnnnnnnnnnnnnnnnnnnnnnnnnnnnnnnnnnnnnnnnnnnnnnnnnnnnnnnnnnnnnnnnnnnnnnnnnnnnnnnnnnnnnnnnnnnnnnnnnnnnnnnnnnnnnnnnnnnnnnnnnnnnnnnnnnnnnnnnnnnnnnnnnnnnnnnnnnnnnnnnnnnnnnnnnnnnnnnnnnnnnnnnnnnnnnnnnnnnnnnnnnnnnnnnnnnnnnnnnnnnnnnnnnnnnnnnnnnnnnnnnnnnnnnnnnnnnnnnnnnnnnnnnnnnnnnnnnnnnnnnnnnnnnnnnnnnnnnnnnnnnnnnnnnnnnnnnnnnnnnnnnnnnnnnnnnnnnnnnnnnnnnnnnnnnnnnnnnnnnnnnnnnnnnnnnnnnnnnnnnnnnnnnnnnnnnnnnnnnnnnnnnnnnnnnnnnnnnnnnnnnnnnnnnnnnnnnnnnnnnnnnnnnnnnnnnnnnnnnnnnnnnnnnnnnnnnnnnnnnnnnnnnnnnnnnnnnnnnnnnnnnnnnnnnnnnnnnnnnnnnnnnnnnnnnnnnnnnnnnnnnnnnnnnnnnnnnnnnnnnnnnnnnnnnnnnnnnnnnnnnnnnnnnnnnnnnnnnnnnnnnnnnnnnnnnnnnnnnnnnnnnnnnnnnnnnnnnnnnnnnnnnnnnnnnnnnnnnnnnnnnnnnnnnnnnnnnnnnnnnnnnnnnnnnnnnnnnnnnnnnnnnnnnnnnnnnnnnnnnnnnnnnnnnnnnnnnnnnnnnnnnnnnnnnnnnnnnnnnnnnnnnnnnnnnnnnnnnnnnnnnnnnnnnnnnnnnnnnnnnnnnnnnnnnnnnnnnnnnnnnnnnnnnnnnnnnnnnnnnnnnnnnnnnnnnnnnnnnnnnnnnnnnnnnnnnnnnnnnnnnnnnnnnnnnnnnnnnnnnnnnnnnnnnnnnnnnnnnnnnnnnnnnnnnnnnnnnnnnnnnnnnnnnnnnnnnnnnnnnnnnnnnnnnnnnnnnnnnnnnnnnnnnnnnnnnnnnnnnnnnnnnnnnnnnnnnnnnnnnnnnnnnnnnnnnnnnnnnnnnnnnnnnnnnnnnnnnnnnnnnnnnnnnnnnnnnnnnnnnnnnnnnnnnnnnnnnnnnnnnnnnnnnnnnnnnnnnnnnnnnnnnnnnnnnnnnnnnnnnnnnnnnnnnnnnnnnnnnnnnnnnnnnnnnnnnnnnnnnnnnnnnnnnnnnnnnnnnnnnnnnnnnnnnnnnnnnnnnnnnnnnnnnnnnnnnnnnnnnnnnnnnnnnnnnnnnnnnnnnnnnnnnnnnnnnnnnnnnnnnnnnnnnnnnnnnnnnnnnnnnnnnnnnnnnnnnnnnnnnnnnnnnnnnnnnnnnnnnnnnnnnnnnnnnnnnnnnnnnnnnnnnnnnnnnnnnnnnnnnnnnnnnnnnnnnnnnnnnnnnnnnnnnnnnnnnnnnnnnnnnnnnnnnnnnnnnnnnnnnnnnnnnnnnnnnnnnnnnnnnnnnnnnnnnnnnnnnnnnnnnnnnnnnnnnnnnnnnnnnnnnnnnnnnnnnnnnnnnnnnnnnnnnnnnnnnnnnnnnnnnnnnnnnnnnnnnnnnnnnnnnnnnnnnnnnnnnnnnnnnnnnnnnnnnnnnnnnnnnnnnnnnnnnnnnnnnnnnnnnnnnnnnnnnnnnnnnnnnnnnnnnnnnnnnnnnnnnnnnnnnnnnnnnnnnnnnnnnnnnnnnnnnnnnnnnnnnnnnnnnnnnnnnnnnnnnnnnnnnnnnnnnnnnnnnnnnnnnnnnnnnnnnnnnnnnnnnnnnnnnnnnnnnnnnnnnnnnnnnnnnnnnnnnnnnnnnnnnnnnnnnnnnnnnnnnnnnnnnnnnnnnnnnnnnnnnnnnnnnnnnnnnnnnnnnnnnnnnnnnnnnnnnnnnnnnnnnnnnnnnnnnnnnnnnnnnnnnnnnnnnnnnnnnnnnnnnnnnnnnnnnnnnnnnnnnnnnnnnnnnnnnnnnnnnnnnnnnnnnnnnnnnnnnnnnnnnnnnnnnnnnnnnnnnnnnnnnnnnnnnnnnnnnnnnnnnnnnnnnnnnnnnnnnnnnnnnnnnnnnnnnnnnnnnnnnnnnnnnnnnnnnnnnnnnnnnnnnnnnnnnnnnnnnnnnnnnnnnnnnnnnnnnnnnnnnnnnnnnnnnnnnnnnnnnnnnnnnnnnnnnnnnnnnnnnnnnnnnnnnnnnnnnnnnnnnnnnnnnnnnnnnnnnnnnnnnnnnnnnnnnnnnnnnnnnnnnnnnnnnnnnnnnnnnnnnnnnnnnnnnnnnnnnnnnnnnnnnnnnnnnnnnnnnnnnnnnnnnnnnnnnnnnnnnnnnnnnnnnnnnnnnnnnnnnnnnnnnnnnnnnnnnnnnnnnnnnnnnnnnnnnnnnnnnnnnnnnnnnnnnnnnnnnnnnnnnnnnnnnnnnnnnnnnnnnnnnnnnnnnnnnnnnnnnnnnnnnnnnnnnnnnnnnnnnnnnnnnnnnnnnnnnnnnnnnnnnnnnnnnnnnnnnnnnnnnnnnnnnnnnnnnnnnnnnnnnnnnnnnnnnnnnnnnnnnnnnnnnnnnnnnnnnnnnnnnnnnnnnnnnnnnnnnnnnnnnnnnnnnnnnnnnnnnnnnnnnnnnnnnnnnnnnnnnnnnnnnnnnnnnnnnnnnnnnnnnnnnnnnnnnnnnnnnnnnnnnnnnnnnnnnnnnnnnnnnnnnnnnnnnnnnnnnnnnnnnnnnnnnnnnnnnnnnnnnnnnnnnnnnnnnnnnnnnnnnnnnnnnnnnnnnnnnnnnnnnnnnnnnnnnnnnnnnnnnnnnnnnnnnnnnnnnnnnnnnnnnnnnnnnnnnnnnnnnnnnnnnnnnnnnnnnnnnnnnnnnnnnnnnnnnnnnnnnnnnnnnnnnnnnnnnnnnnnnnnnnnnnnnnnnnnnnnnnnnnnnnnnnnnnnnnnnnnnnnnnnnnnnnnnnnnnnnnnnnnnnnnnnnnnnnnnnnnnnnnnnnnnnnnnnnnnnnnnnnnnnnnnnnnnnnnnnnnnnnnnnnnnnnnnnnnnnnnnnnnnnnnnnnnnnnnnnnnnnnnnnnnnnnnnnnnnnnnnnnnnnnnnnnnnnnnnnnnnnnnnnnnnnnnnnnnnnnnnnnnnnnnnnnnnnnnnnnnnnnnnnnnnnnnnnnnnnnnnnnnnnnnnnnnnnnnnnnnnnnnnnnnnnnnnnnnnnnnnnnnnnnnnnnnnnnnnnnnnnnnnnnnnnnnnnnnnnnnnnnnnnnnnnnnnnnnnnnnnnnnnnnnnnnnnnnnnnnnnnnnnnnnnnnnnnnnnnnnnnnnnnnnnnnnnnnnnnnnnnnnnnnnnnnnnnnnnnnnnnnnnnnnnnnnnnnnnnnnnnnnnnnnnnnnnnnnnnnnnnnnnnnnnnnnnnnnnnnnnnnnnnnnnnnnnnnnnnnnnnnnnnnnnnnnnnnnnnnnnnnnnnnnnnnnnnnnnnnnnnnnnnnnnnnnnnnnnnnnnnnnnnnnnnnnnnnnnnnnnnnnnnnnnnnnnnnnnnnnnnnnnnnnnnnnnnnnnnnnnnnnnnnnnnnnnnnnnnnnnnnnnnnnnnnnnnnnnnnnnnnnnnnnnnnnnnnnnnnnnnnnnnnnnnnnnnnnnnnnnnnnnnnnnnnnnnnnnnnnnnnnnnnnnnnnnnnnnnnnnnnnnnnnnnnnnnnnnnnnnnnnnnnnnnnnnnnnnnnnnnnnnnnnnnnnnnnnnnnnnnnnnnnnnnnnnnnnnnnnnnnnnnnnnnnnnnnnnnnnnnnnnnnnnnnnnnnnnnnnnnnnnnnnnnnnnnnnnnnnnnnnnnnnnnnnnnnnnnnnnnnnnnnnnnnnnnnnnnnnnnnnnnnnnnnnnnnnnnnnnnnnnnnnnnnnnnnnnnnnnnnnnnnnnnnnnnnnnnnnnnnnnnnnnnnnnnnnnnnnnnnnnnnnnnnnnnnnnnnnnnnnnnnnnnnnnnnnnnnnnnnnnnnnnnnnnnnnnnnnnnnnnnnnnnnnnnnnnnnnnnnnnnnnnnnnnnnnnnnnnnnnnnnnnnnnnnnnnnnnnnnnnnnnnnnnnnnnnnnnnnnnnnnnnnnnnnnnnnnnnnnnnnnnnnnnnnnnnnnnnnnnnnnnnnnnnnnnnnnnnnnnnnnnnnnnnnnnnnnnnnnnnnnnnnnnnnnnnnnnnnnnnnnnnnnnnnnnnnnnnnnnnnnnnnnnnnnnnnnnnnnnnnnnnnnnnnnnnnnnnnnnnnnnnnnnnnnnnnnnnnnnnnnnnnnnnnnnnnnnnnnnnnnnnnnnnnnnnnnnnnnnnnnnnnnnnnnnnnnnnnnnnnnnnnnnnnnnnnnnnnnnnnnnnnnnnnnnnnnnnnnnnnnnnnnnnnnnnnnnnnnnnnnnnnnnnnnnnnnnnnnnnnnnnnnnnnnnnnnnnnnnnnnnnnnnnnnnnnnnnnnnnnnnnnnnnnnnnnnnnnnnnnnnnnnnnnnnnnnnnnnnnnnnnnnnnnnnnnnnnnnnnnnnnnnnnnnnnnnnnnnnnnnnnnnnnnnnnnnnnnnnnnnnnnnnnnnnnnnnnnnnnnnnnnnnnnnnnnnnnnnnnnnnnnnnnnnnnnnnnnnnnnnnnnnnnnnnnnnnnnnnnnnnnnnnnnnnnnnnnnnnnnnnnnnnnnnnnnnnnnnnnnnnnnnnnnnnnnnnnnnnnnnnnnnnnnnnnnnnnnnnnnnnnnnnnnnnnnnnnnnnnnnnnnnnnnnnnnnnnnnnnnnnnnnnnnnnnnnnnnnnnnnnnnnnnnnnnnnnnnnnnnnnnnnnnnnnnnnnnnnnnnnnnnnnnnnnnnnnnnnnnnnnnnnnnnnnnnnnnnnnnnnnnnnnnnnnnnnnnnnnnnnnnnnnnnnnnnnnnnnnnnnnnnnnnnnnnnnnnnnnnnnnnnnnnnnnnnnnnnnnnnnnnnnnnnnnnnnnnnnnnnnnnnnnnnnnnnnnnnnnnnnnnnnnnnnnnnnnnnnnnnnnnnnnnnnnnnnnnnnnnnnnnnnnnnnnnnnnnnnnnnnnnnnnnnnnnnnnnnnnnnnnnnnnnnnnnnnnnnnnnnnnnnnnnnnnnnnnnnnnnnnnnnnnnnnnnnnnnnnnnnnnnnnnnnnnnnnnnnnnnnnnnnnnnnnnnnnnnnnnnnnnnnnnnnnnnnnnnnnnnnnnnnnnnnnnnnnnnnnnnnnnnnnnnnnnnnnnnnnnnnnnnnnnnnnnnnnnnnnnnnnnnnnnnnnnnnnnnnnnnnnnnnnnnnnnnnnnnnnnnnnnnnnnnnnnnnnnnnnnnnnnnnnnnnnnnnnnnnnnnnnnnnnnnnnnnnnnnnnnnnnnnnnnnnnnnnnnnnnnnnnnnnnnnnnnnnnnnnnnnnnnnnnnnnnnnnnnnnnnnnnnnnnnnnnnnnnnnnnnnnnnnnnnnnnnnnnnnnnnnnnnnnnnnnnnnnnnnnnnnnnnnnnnnnnnnnnnnnnnnnnnnnnnnnnnnnnnnnnnnnnnnnnnnnnnnnnnnnnnnnnnnnnnnnnnnnnnnnnnnnnnnnnnnnnnnnnnnnnnnnnnnnnnnnnnnnnnnnnnnnnnnnnnnnnnnnnnnnnnnnnnnnnnnnnnnnnnnnnnnnnnnnnnnnnnnnnnnnnnnnnnnnnnnnnnnnnnnnnnnnnnnnnnnnnnnnnnnnnnnnnnnnnnnnnnnnnnnnnnnnnnnnnnnnnnnnnnnnnnnnnnnnnnnnnnnnnnnnnnnnnnnnnnnnnnnnnnnnnnnnnnnnnnnnnnnnnnnnnnnnnnnnnnnnnnnnnnnnnnnnnnnnnnnnnnnnnnnnnnnnnnnnnnnnnnnnnnnnnnnnnnnnnnnnnnnnnnnnnnnnnnnnnnnnnnnnnnnnnnnnnnnnnnnnnnnnnnnnnnnnnnnnnnnnnnnnnnnnnnnnnnnnnnnnnnnnnnnnnnnnnnnnnnnnnnnnnnnnnnnnnnnnnnnnnnnnnnnnnnnnnnnnnnnnnnnnnnnnnnnnnnnnnnnnnnnnnnnnnnnnnnnnnnnnnnnnnnnnnnnnnnnnnnnnnnnnnnnnnnnnnnnnnnnnnnnnnnnnnnnnnnnnnnnnnnnnnnnnnnnnnnnnnnnnnnnnnnnnnnnnnnnnnnnnnnnnnnnnnnnnnnnnnnnnnnnnnnnnnnnnnnnnnnnnnnnnnnnnnnnnnnnnnnnnnnnnnnnnnnnnnnnnnnnnnnnnnnnnnnnnnnnnnnnnnnnnnnnnnnnnnnnnnnnnnnnnnnnnnnnnnnnnnnnnnnnnnnnnnnnnnnnnnnnnnnnnnnnnnnnnnnnnnnnnnnnnnnnnnnnnnnnnnnnnnnnnnnnnnnnnnnnnnnnnnnnnnnnnnnnnnnnnnnnnnnnnnnnnnnnnnnnnnnnnnnnnnnnnnnnnnnnnnnnnnnnnnnnnnnnnnnnnnnnnnnnnnnnnnnnnnnnnnnnnnnnnnnnnnnnnnnnnnnnnnnnnnnnnnnnnnnnnnnnnnnnnnnnnnnnnnnnnnnnnnnnnnnnnnnnnnnnnnnnnnnnnnnnnnnnnnnnnnnnnnnnnnnnnnnnnnnnnnnnnnnnnnnnnnnnnnnnnnnnnnnnnnnnnnnnnnnnnnnnnnnnnnnnnnnnnnnnnnnnnnnnnnnnnnnnnnnnnnnnnnnnnnnnnnnnnnnnnnnnnnnnnnnnnnnnnnnnnnnnnnnnnnnnnnnnnnnnnnnnnnnnnnnnnnnnnnnnnnnnnnnnnnnnnnnnnnnnnnnnnnnnnnnnnnnnnnnnnnnnnnnnnnnnnnnnnnnnnnnnnnnnnnnnnnnnnnnnnnnnnnnnnnnnnnnnnnnnnnnnnnnnnnnnnnnnnnnnnnnnnnnnnnnnnnnnnnnnnnnnnnnnnnnnnnnnnnnnnnnnnnnnnnnnnnnnnnnnnnnnnnnnnnnnnnnnnnnnnnnnnnnnnnnnnnnnnnnnnnnnnnnnnnnnnnnnnnnnnnnnnnnnnnnnnnnnnnnnnnnnnnnnnnnnnnnnnnnnnnnnnnnnnnnnnnnnnnnnnnnnnnnnnnnnnnnnnnnnnnnnnnnnnnnnnnnnnnnnnnnnnnnnnnnnnnnnnnnnnnnnnnnnnnnnnnnnnnnnnnnnnnnnnnnnnnnnnnnnnnnnnnnnnnnnnnnnnnnnnnnnnnnnnnnnnnnnnnnnnnnnnnnnnnnnnnnnnnnnnnnnnnnnnnnnnnnnnnnnnnnnnnnnnnnnnnnnnnnnnnnnnnnnnnnnnnnnnnnnnnnnnnnnnnnnnnnnnnnnnnnnnnnnnnnnnnnnnnnnnnnnnnnnnnnnnnnnnnnnnnnnnnnnnnnnnnnnnnnnnnnnnnnnnnnnnnnnnnnnnnnnnnnnnnnnnnnnnnnnnnnnnnnnnnnnnnnnnnnnnnnnnnnnnnnnnnnnnnnnnnnnnnnnnnnnnnnnnnnnnnnnnnnnnnnnnnnnnnnnnnnnnnnnnnnnnnnnnnnnnnnnnnnnnnnnnnnnnnnnnnnnnnnnnnnnnnnnnnnnnnnnnnnnnnnnnnnnnnnnnnnnnnnnnnnnnnnnnnnnnnnnnnnnnnnnnnnnnnnnnnnnnnnnnnnnnnnnnnnnnnnnnnnnnnnnnnnnnnnnnnnnnnnnnnnnnnnnnnnnnnnnnnnnnnnnnnnnnnnnnnnnnnnnnnnnnnnnnnnnnnnnnnnnnnnnnnnnnnnnnnnnnnnnnnnnnnnnnnnnnnnnnnnnnnnnnnnnnnnnnnnnnnnnnnnnnnnnnnnnnnnnnnnnnnnnnnnnnnnnnnnnnnnnnnnnnnnnnnnnnnnnnnnnnnnnnnnnnnnnnnnnnnnnnnnnnnnnnnnnnnnnnnnnnnnnnnnnnnnnnnnnnnnnnnnnnnnnnnnnnnnnnnnnnnnnnnnnnnnnnnnnnnnnnnnnnnnnnnnnnnnnnnnnnnnnnnnnnnnnnnnnnnnnnnnnnnnnnnnnnnnnnnnnnnnnnnnnnnnnnnnnnnnnnnnnnnnnnnnnnnnnnnnnnnnnnnnnnnnnnnnnnnnnnnnnnnnnnnnnnnnnnnnnnnnnnnnnnnnnnnnnnnnnnnnnnnnnnnnnnnnnnnnnnnnnnnnnnnnnnnnnnnnnnnnnnnnnnnnnnnnnnnnnnnnnnnnnnnnnnnnnnnnnnnnnnnnnnnnnnnnnnnnnnnnnnnnnnnnnnnnnnnnnnnnnnnnnnnnnnnnnnnnnnnnnnnnnnnnnnnnnnnnnnnnnnnnnnnnnnnnnnnnnnnnnnnnnnnnnnnnnnnnnnnnnnnnnnnnnnnnnnnnnnnnnnnnnnnnnnnnnnnnnnnnnnnnnnnnnnnnnnnnnnnnnnnnnnnnnnnnnnnnnnnnnnnnnnnnnnnnnnnnnnnnnnnnnnnnnnnnnnnnnnnnnnnnnnnnnnnnnnnnnnnnnnnnnnnnnnnnnnnnnnnnnnnnnnnnnnnnnnnnnnnnnnnnnnnnnnnnnnnnnnnnnnnnnnnnnnnnnnnnnnnnnnnnnnnnnnnnnnnnnnnnnnnnnnnnnnnnnnnnnnnnnnnnnnnnnnnnnnnnnnnnnnnnnnnnnnnnnnnnnnnnnnnnnnnnnnnnnnnnnnnnnnnnnnnnnnnnnnnnnnnnnnnnnnnnnnnnnnnnnnnnnnnnnnnnnnnnnnnnnnnnnnnnnnnnnnnnnnnnnnnnnnnnnnnnnnnnnnnnnnnnnnnnnnnnnnnnnnnnnnnnnnnnnnnnnnnnnnnnnnnnnnnnnnnnnnnnnnnnnnnnnnnnnnnnnnnnnnnnnnnnnnnnnnnnnnnnnnnnnnnnnnnnnnnnnnnnnnnnnnnnnnnnnnnnnnnnnnnnnnnnnnnnnnnnnnnnnnnnnnnnnnnnnnnnnnnnnnnnnnnnnnnnnnnnnnnnnnnnnnnnnnnnnnnnnnnnnnnnnnnnnnnnnnnnnnnnnnnnnnnnnnnnnnnnnnnnnnnnnnnnnnnnnnnnnnnnnnnnnnnnnnnnnnnnnnnnnnnnnnnnnnnnnnnnnnnnnnnnnnnnnnnnnnnnnnnnnnnnnnnnnnnnnnnnnnnnnnnnnnnnnnnnnnnnnnnnnnnnnnnnnnnnnnnnnnnnnnnnnnnnnnnnnnnnnnnnnnnnnnnnnnnnnnnnnnnnnnnnnnnnnnnnnnnnnnnnnnnnnnnnnnnnnnnnnnnnnnnnnnnnnnnnnnnnnnnnnnnnnnnnnnnnnnnnnnnnnnnnnnnnnnnnnnnnnnnnnnnnnnnnnnnnnnnnnnnnnnnnnnnnnnnnnnnnnnnnnnnnnnnnnnnnnnnnnnnnnnnnnnnnnnnnnnnnnnnnnnnnnnnnnnnnnnnnnnnnnnnnnnnnnnnnnnnnnnnnnnnnnnnnnnnnnnnnnnnnnnnnnnnnnnnnnnnnnnnnnnnnnnnnnnnnnnnnnnnnnnnnnnnnnnnnnnnnnnnnnnnnnnnnnnnnnnnnnnnnnnnnnnnnnnnnnnnnnnnnnnnnnnnnnnnnnnnnnnnnnnnnnnnnnnnnnnnnnnnnnnnnnnnnnnnnnnnnnnnnnnnnnnnnnnnnnnnnnnnnnnnnnnnnnnnnnnnnnnnnnnnnnnnnnnnnnnnnnnnnnnnnnnnnnnnnnnnnnnnnnnnnnnnnnnnnnnnnnnnnnnnnnnnnnnnnnnnnnnnnnnnnnnnnnnnnnnnnnnnnnnnnnnnnnnnnnnnnnnnnnnnnnnnnnnnnnnnnnnnnnnnnnnnnnnnnnnnnnnnnnnnnnnnnnnnnnnnnnnnnnnnnnnnnnnnnnnnnnnnnnnnnnnnnnnnnnnnnnnnnnnnnnnnnnnnnnnnnnnnnnnnnnnnnnnnnnnnnnnnnnnnnnnnnnnnnnnnnnnnnnnnnnnnnnnnnnnnnnnnnnnnnnnnnnnnnnnnnnnnnnnnnnnnnnnnnnnnnnnnnnnnnnnnnnnnnnnnnnnnnnnnnnnnnnnnnnnnnnnnnnnnnnnnnnnnnnnnnnnnnnnnnnnnnnnnnnnnnnnnnnnnnnnnnnnnnnnnnnnnnnnnnnnnnnnnnnnnnnnnnnnnnnnnnnnnnnnnnnnnnnnnnnnnnnnnnnnnnnnnnnnnnnnnnnnnnnnnnnnnnnnnnnnnnnnnnnnnnnnnnnnnnnnnnnnnnnnnnnnnnnnnnnnnnnnnnnnnnnnnnnnnnnnnnnnnnnnnnnnnnnnnnnnnnnnnnnnnnnnnnnnnnnnnnnnnnnnnnnnnnnnnnnnnnnnnnnnnnnnnnnnnnnnnnnnnnnnnnnnnnnnnnnnnnnnnnnnnnnnnnnnnnnnnnnnnnnnnnnnnnnnnnnnnnnnnnnnnnnnnnnnnnnnnnnnnnnnnnnnnnnnnnnnnnnnnnnnnnnnnnnnnnnnnnnnnnnnnnnnnnnnnnnnnnnnnnnnnnnnnnnnnnnnnnnnnnnnnnnnnnnnnnnnnnnnnnnnnnnnnnnnnnnnnnnnnnnnnnnnnnnnnnnnnnnnnnnnnnnnnnnnnnnnnnnnnnnnnnnnnnnnnnnnnnnnnnnnnnnnnnnnnnnnnnnnnnnnnnnnnnnnnnnnnnnnnnnnnnnnnnnnnnnnnnnnnnnnnnnnnnnnnnnnnnnnnnnnnnnnnnnnnnnnnnnnnnnnnnnnnnnnnnnnnnnnnnnnnnnnnnnnnnnnnnnnnnnnnnnnnnnnnnnnnnnnnnnnnnnnnnnnnnnnnnnnnnnnnnnnnnnnnnnnnnnnnnnnnnnnnnnnnnnnnnnnnnnnnnnnnnnnnnnnnnnnnnnnnnnnnnnnnnnnnnnnnnnnnnnnnnnnnnnnnnnnnnnnnnnnnnnnnnnnnnnnnnnnnnnnnnnnnnnnnnnnnnnnnnnnnnnnnnnnnnnnnnnnnnnnnnnnnnnnnnnnnnnnnnnnnnnnnnnnnnnnnnnnnnnnnnnnnnnnnnnnnnnnnnnnnnnnnnnnnnnnnnnnnnnnnnnnnnnnnnnnnnnnnnnnnnnnnnnnnnnnnnnnnnnnnnnnnnnnnnnnnnnnnnnnnnnnnnnnnnnnnnnnnnnnnnnnnnnnnnnnnnnnnnnnnnnnnnnnnnnnnnnnnnnnnnnnnnnnnnnnnnnnnnnnnnnnnnnnnnnnnnnnnnnnnnnnnnnnnnnnnnnnnnnnnnnnnnnnnnnnnnnnnnnnnnnnnnnnnnnnnnnnnnnnnnnnnnnnnnnnnnnnnnnnnnnnnnnnnnnnnnnnnnnnnnnnnnnnnnnnnnnnnnnnnnnnnnnnnnnnnnnnnnnnnnnnnnnnnnnnnnnnnnnnnnnnnnnnnnnnnnnnnnnnnnnnnnnnnnnnnnnnnnnnnnnnnnnnnnnnnnnnnnnnnnnnnnnnnnnnnnnnnnnnnnnnnnnnnnnnnnnnnnnnnnnnnnnnnnnnnnnnnnnnnnnnnnnnnnnnnnnnnnnnnnnnnnnnnnnnnnnnnnnnnnnnnnnnnnnnnnnnnnnnnnnnnnnnnnnnnnnnnnnnnnnnnnnnnnnnnnnnnnnnnnnnnnnnnnnnnnnnnnnnnnnnnnnnnnnnnnnnnnnnnnnnnnnnnnnnnnnnnnnnnnnnnnnnnnnnnnnnnnnnnnnnnnnnnnnnnnnnnnnnnnnnnnnnnnnnnnnnnnnnnnnnnnnnnnnnnnnnnnnnnnnnnnnnnnnnnnnnnnnnnnnnnnnnnnnnnnnnnnnnnnnnnnnnnnnnnnnnnnnnnnnnnnnnnnnnnnnnnnnnnnnnnnnnnnnnnnnnnnnnnnnnnnnnnnnnnnnnnnnnnnnnnnnnnnnnnnnnnnnnnnnnnnnnnnnnnnnnnnnnnnnnnnnnnnnnnnnnnnnnnnnnnnnnnnnnnnnnnnnnnnnnnnnnnnnnnnnnnnnnnnnnnnnnnnnnnnnnnnnnnnnnnnnnnnnnnnnnnnnnnnnnnnnnnnnnnnnnnnnnnnnnnnnnnnnnnnnnnnnnnnnnnnnnnnnnnnnnnnnnnnnnnnnnnnnnnnnnnnnnnnnnnnnnnnnnnnnnnnnnnnnnnnnnnnnnnnnnnnnnnnnnnnnnnnnnnnnnnnnnnnnnnnnnnnnnnnnnnnnnnnnnnnnnnnnnnnnnnnnnnnnnnnnnnnnnnnnnnnnnnnnnnnnnnnnnnnnnnnnnnnnnnnnnnnnnnnnnnnnnnnnnnnnnnnnnnnnnnnnnnnnnnnnnnnnnnnnnnnnnnnnnnnnnnnnnnnnnnnnnnnnnnnnnnnnnnnnnnnnnnnnnnnnnnnnnnnnnnnnnnnnnnnnnnnnnnnnnnnnnnnnnnnnnnnnnnnnnnnnnnnnnnnnnnnnnnnnnnnnnnnnnnnnnnnnnnnnnnnnnnnnnnnnnnnnnnnnnnnnnnnnnnnnnnnnnnnnnnnnnnnnnnnnnnnnnnnnnnnnnnnnnnnnnnnnnnnnnnnnnnnnnnnnnnnnnnnnnnnnnnnnnnnnnnnnnnnnnnnnnnnnnnnnnnnnnnnnnnnnnnnnnnnnnnnnnnnnnnnnnnnnnnnnnnnnnnnnnnnnnnnnnnnnnnnnnnnnnnnnnnnnnnnnnnnnnnnnnnnnnnnnnnnnnnnnnnnnnnnnnnnnnnnnnnnnnnnnnnnnnnnnnnnnnnnnnnnnnnnnnnnnnnnnnnnnnnnnnnnnnnnnnnnnnnnnnnnnnnnnnnnnnnnnnnnnnnnnnnnnnnnnnnnnnnnnnnnnnnnnnnnnnnnnnnnnnnnnnnnnnnnnnnnnnnnnnnnnnnnnnnnnnnnnnnnnnnnnnnnnnnnnnnnnnnnnnnnnnnnnnnnnnnnnnnnnnnnnnnnnnnnnnnnnnnnnnnnnnnnnnnnnnnnnnnnnnnnnnnnnnnnnnnnnnnnnnnnnnnnnnnnnnnnnnnnnnnnnnnnnnnnnnnnnnnnnnnnnnnnnnnnnnnnnnnnnnnnnnnnnnnnnnnnnnnnnnnnnnnnnnnnnnnnnnnnnnnnnnnnnnnnnnnnnnnnnnnnnnnnnnnnnnnnnnnnnnnnnnnnnnnnnnnnnnnnnnnnnnnnnnnnnnnnnnnnnnnnnnnnnnnnnnnnnnnnnnnnnnnnnnnnnnnnnnnnnnnnnnnnnnnnnnnnnnnnnnnnnnnnnnnnnnnnnnnnnnnnnnnnnnnnnnnnnnnnnnnnnnnnnnnnnnnnnnnnnnnnnnnnnnnnnnnnnnnnnnnnnnnnnnnnnnnnnnnnnnnnnnnnnnnnnnnnnnnnnnnnnnnnnnnnnnnnnnnnnnnnnnnnnnnnnnnnnnnnnnnnnnnnnnnnnnnnnnnnnnnnnnnnnnnnnnnnnnnnnnnnnnnnnnnnnnnnnnnnnnnnnnnnnnnnnnnnnnnnnnnnnnnnnnnnnnnnnnnnnnnnnnnnnnnnnnnnnnnnnnnnnnnnnnnnnnnnnnnnnnnnnnnnnnnnnnnnnnnnnnnnnnnnnnnnnnnnnnnnnnnnnnnnnnnnnnnnnnnnnnnnnnnnnnnnnnnnnnnnnnnnnnnnnnnnnnnnnnnnnnnnnnnnnnnnnnnnnnnnnnnnnnnnnnnnnnnnnnnnnnnnnnnnnnnnnnnnnnnnnnnnnnnnnnnnnnnnnnnnnnnnnnnnnnnnnnnnnnnnnnnnnnnnnnnnnnnnnnnnnnnnnnnnnnnnnnnnnnnnnnnnnnnnnnnnnnnnnnnnnnnnnnnnnnnnnnnnnnnnnnnnnnnnnnnnnnnnnnnnnnnnnnnnnnnnnnnnnnnnnnnnnnnnnnnnnnnnnnnnnnnnnnnnnnnnnnnnnnnnnnnnnnnnnnnnnnnnnnnnnnnnnnnnnnnnnnnnnnnnnnnnnnnnnnnnnnnnnnnnnnnnnnnnnnnnnnnnnnnnnnnnnnnnnnnnnnnnnnnnnnnnnnnnnnnnnnnnnnnnnnnnnnnnnnnnnnnnnnnnnnnnnnnnnnnnnnnnnnnnnnnnnnnnnnnnnnnnnnnnnnnnnnnnnnnnnnnnnnnnnnnnnnnnnnnnnnnnnnnnnnnnnnnnnnnnnnnnnnnnnnnnnnnnnnnnnnnnnnnnnnnnnnnnnnnnnnnnnnnnnnnnnnnnnnnnnnnnnnnnnnnnnnnnnnnnnnnnnnnnnnnnnnnnnnnnnnnnnnnnnnnnnnnnnnnnnnnnnnnnnnnnnnnnnnnnnnnnnnnnnnnnnnnnnnnnnnnnnnnnnnnnnnnnnnnnnnnnnnnnnnnnnnnnnnnnnnnnnnnnnnnnnnnnnnnnnnnnnnnnnnnnnnnnnnnnnnnnnnnnnnnnnnnnnnnnnnnnnnnnnnnnnnnnnnnnnnnnnnnnnnnnnnnnnnnnnnnnnnnnnnnnnnnnnnnnnnnnnnnnnnnnnnnnnnnnnnnnnnnnnnnnnnnnnnnnnnnnnnnnnnnnnnnnnnnnnnnnnnnnnnnnnnnnnnnnnnnnnnnnnnnnnnnnnnnnnnnnnnnnnnnnnnnnnnnnnnnnnnnnnnnnnnnnnnnnnnnnnnnnnnnnnnnnnnnnnnnnnnnnnnnnnnnnnnnnnnnnnnnnnnnnnnnnnnnnnnnnnnnnnnnnnnnnnnnnnnnnnnnnnnnnnnnnnnnnnnnnnnnnnnnnnnnnnnnnnnnnnnnnnnnnnnnnnnnnnnnnnnnnnnnnnnnnnnnnnnnnnnnnnnnnnnnnnnnnnnnnnnnnnnnnnnnnnnnnnnnnnnnnnnnnnnnnnnnnnnnnnnnnnnnnnnnnnnnnnnnnnnnnnnnnnnnnnnnnnnnnnnnnnnnnnnnnnnnnnnnnnnnnnnnnnnnnnnnnnnnnnnnnnnnnnnnnnnnnnnnnnnnnnnnnnnnnnnnnnnnnnnnnnnnnnnnnnnnnnnnnnnnnnnnnnnnnnnnnnnnnnnnnnnnnnnnnnnnnnnnnnnnnnnnnnnnnnnnnnnnnnnnnnnnnnnnnnnnnnnnnnnnnnnnnnnnnnnnnnnnnnnnnnnnnnnnnnnnnnnnnnnnnnnnnnnnnnnnnnnnnnnnnnnnnnnnnnnnnnnnnnnnnnnnnnnnnnnnnnnnnnnnnnnnnnnnnnnnnnnnnnnnnnnnnnnnnnnnnnnnnnnnnnnnnnnnnnnnnnnnnnnnnnnnnnnnnnnnnnnnnnnnnnnnnnnnnnnnnnnnnnnnnnnnnnnnnnnnnnnnnnnnnnnnnnnnnnnnnnnnnnnnnnnnnnnnnnnnnnnnnnnnnnnnnnnnnnnnnnnnnnnnnnnnnnnnnnnnnnnnnnnnnnnnnnnnnnnnnnnnnnnnnnnnnnnnnnnnnnnnnnnnnnnnnnnnnnnnnnnnnnnnnnnnnnnnnnnnnnnnnnnnnnnnnnnnnnnnnnnnnnnnnnnnnnnnnnnnnnnnnnnnnnnnnnnnnnnnnnnnnnnnnnnnnnnnnnnnnnnnnnnnnnnnnnnnnnnnnnnnnnnnnnnnnnnnnnnnnnnnnnnnnnnnnnnnnnnnnnnnnnnnnnnnnnnnnnnnnnnnnnnnnnnnnnnnnnnnnnnnnnnnnnnnnnnnnnnnnnnnnnnnnnnnnnnnnnnnnnnnnnnnnnnnnnnnnnnnnnnnnnnnnnnnnnnnnnnnnnnnnnnnnnnnnnnnnnnnnnnnnnnnnnnnnnnnnnnnnnnnnnnnnnnnnnnnnnnnnnnnnnnnnnnnnnnnnnnnnnnnnnnnnnnnnnnnnnnnnnnnnnnnnnnnnnnnnnnnnnnnnnnnnnnnnnnnnnnnnnnnnnnnnnnnnnnnnnnnnnnnnnnnnnnnnnnnnnnnnnnnnnnnnnnnnnnnnnnnnnnnnnnnnnnnnnnnnnnnnnnnnnnnnnnnnnnnnnnnnnnnnnnnnnnnnnnnnnnnnnnnnnnnnnnnnnnnnnnnnnnnnnnnnnnnnnnnnnnnnnnnnnnnnnnnnnnnnnnnnnnnnnnnnnnnnnnnnnnnnnnnnnnnnnnnnnnnnnnnnnnnnnnnnnnnnnnnnnnnnnnnnnnnnnnnnnnnnnnnnnnnnnnnnnnnnnnnnnnnnnnnnnnnnnnnnnnnnnnnnnnnnnnnnnnnnnnnnnnnnnnnnnnnnnnnnnnnnnnnnnnnnnnnnnnnnnnnnnnnnnnnnnnnnnnnnnnnnnnnnnnnnnnnnnnnnnnnnnnnnnnnnnnnnnnnnnnnnnnnnnnnnnnnnnnnnnnnnnnnnnnnnnnnnnnnnnnnnnnnnnnnnnnnnnnnnnnnnnnnnnnnnnnnnnnnnnnnnnnnnnnnnnnnnnnnnnnnnnnnnnnnnnnnnnnnnnnnnnnnnnnnnnnnnnnnnnnnnnnnnnnnnnnnnnnnnnnnnnnnnnnnnnnnnnnnnnnnnnnnnnnnnnnnnnnnnnnnnnnnnnnnnnnnnnnnnnnnnnnnnnnnnnnnnnnnnnnnnnnnnnnnnnnnnnnnnnnnnnnnnnnnnnnnnnnnnnnnnnnnnnnnnnnnnnnnnnnnnnnnnnnnnnnnnnnnnnnnnnnnnnnnnnnnnnnnnnnnnnnnnnnnnnnnnnnnnnnnnnnnnnnnnnnnnnnnnnnnnnnnnnnnnnnnnnnnnnnnnnnnnnnnnnnnnnnnnnnnnnnnnnnnnnnnnnnnnnnnnnnnnnnnnnnnnnnnnnnnnnnnnnnnnnnnnnnnnnnnnnnnnnnnnnnnnnnnnnnnnnnnnnnnnnnnnnnnnnnnnnnnnnnnnnnnnnnnnnnnnnnnnnnnnnnnnnnnnnnnnnnnnnnnnnnnnnnnnnnnnnnnnnnnnnnnnnnnnnnnnnnnnnnnnnnnnnnnnnnnnnnnnnnnnnnnnnnnnnnnnnnnnnnnnnnnnnnnnnnnnnnnnnnnnnnnnnnnnnnnnnnnnnnnnnnnnnnnnnnnnnnnnnnnnnnnnnnnnnnnnnnnnnnnnnnnnnnnnnnnnnnnnnnnnnnnnnnnnnnnnnnnnnnnnnnnnnnnnnnnnnnnnnnnnnnnnnnnnnnnnnnnnnnnnnnnnnnnnnnnnnnnnnnnnnnnnnnnnnnnnnnnnnnnnnnnnnnnnnnnnnnnnnnnnnnnnnnnnnnnnnnnnnnnnnnnnnnnnnnnnnnnnnnnnnnnnnnnnnnnnnnnnnnnnnnnnnnnnnnnnnnnnnnnnnnnnnnnnnnnnnnnnnnnnnnnnnnnnnnnnnnnnnnnnnnnnnnnnnnnnnnnnnnnnnnnnnnnnnnnnnnnnnnnnnnnnnnnnnnnnnnnnnnnnnnnnnnnnnnnnnnnnnnnnnnnnnnnnnnnnnnnnnnnnnnnnnnnnnnnnnnnnnnnnnnnnnnnnnnnnnnnnnnnnnnnnnnnnnnnnnnnnnnnnnnnnnnnnnnnnnnnnnnnnnnnnnnnnnnnnnnnnnnnnnnnnnnnnnnnnnnnnnnnnnnnnnnnnnnnnnnnnnnnnnnnnnnnnnnnnnnnnnnnnnnnnnnnnnnnnnnnnnnnnnnnnnnnnnnnnnnnnnnnnnnnnnnnnnnnnnnnnnnnnnnnnnnnnnnnnnnnnnnnnnnnnnnnnnnnnnnnnnnnnnnnnnnnnnnnnnnnnnnnnnnnnnnnnnnnnnnnnnnnnnnnnnnnnnnnnnnnnnnnnnnnnnnnnnnnnnnnnnnnnnnnnnnnnnnnnnnnnnnnnnnnnnnnnnnnnnnnnnnnnnnnnnnnnnnnnnnnnnnnnnnnnnnnnnnnnnnnnnnnnnnnnnnnnnnnnnnnnnnnnnnnnnnnnnnnnnnnnnnnnnnnnnnnnnnnnnnnnnnnnnnnnnnnnnnnnnnnnnnnnnnnnnnnnnnnnnnnnnnnnnnnnnnnnnnnnnnnnnnnnnnnnnnnnnnnnnnnnnnnnnnnnnnnnnnnnnnnnnnnnnnnnnnnnnnnnnnnnnnnnnnnnnnnnnnnnnnnnnnnnnnnnnnnnnnnnnnnnnnnnnnnnnnnnnnnnnnnnnnnnnnnnnnnnnnnnnnnnnnnnnnnnnnnnnnnnnnnnnnnnnnnnnnnnnnnnnnnnnnnnnnnnnnnnnnnnnnnnnnnnnnnnnnnnnnnnnnnnnnnnnnnnnnnnnnnnnnnnnnnnnnnnnnnnnnnnnnnnnnnnnnnnnnnnnnnnnnnnnnnnnnnnnnnnnnnnnnnnnnnnnnnnnnnnnnnnnnnnnnnnnnnnnnnnnnnnnnnnnnnnnnnnnnnnnnnnnnnnnnnnnnnnnnnnnnnnnnnnnnnnnnnnnnnnnnnnnnnnnnnnnnnnnnnnnnnnnnnnnnnnnnnnnnnnnnnnnnnnnnnnnnnnnnnnnnnnnnnnnnnnnnnnnnnnnnnnnnnnnnnnnnnnnnnnnnnnnnnnnnnnnnnnnnnnnnnnnnnnnnnnnnnnnnnnnnnnnnnnnnnnnnnnnnnnnnnnnnnnnnnnnnnnnnnnnnnnnnnnnnnnnnnnnnnnnnnnnnnnnnnnnnnnnnnnnnnnnnnnnnnnnnnnnnnnnnnnnnnnnnnnnnnnnnnnnnnnnnnnnnnnnnnnnnnnnnnnnnnnnnnnnnnnnnnnnnnnnnnnnnnnnnnnnnnnnnnnnnnnnnnnnnnnnnnnnnnnnnnnnnnnnnnnnnnnnnnnnnnnnnnnnnnnnnnnnnnnnnnnnnnnnnnnnnnnnnnnnnnnnnnnnnnnnnnnnnnnnnnnnnnnnnnnnnnnnnnnnnnnnnnnnnnnnnnnnnnnnnnnnnnnnnnnnnnnnnnnnnnnnnnnnnnnnnnnnnnnnnnnnnnnnnnnnnnnnnnnnnnnnnnnnnnnnnnnnnnnnnnnnnnnnnnnnnnnnnnnnnnnnnnnnnnnnnnnnnnnnnnnnnnnnnnnnnnnnnnnnnnnnnnnnnnnnnnnnnnnnnnnnnnnnnnnnnnnnnnnnnnnnnnnnnnnnnnnnnnnnnnnnnnnnnnnnnnnnnnnnnnnnnnnnnnnnnnnnnnnnnnnnnnnnnnnnnnnnnnnnnnnnnnnnnnnnnnnnnnnnnnnnnnnnnnnnnnnnnnnnnnnnnnnnnnnnnnnnnnnnnnnnnnnnnnnnnnnnnnnnnnnnnnnnnnnnnnnnnnnnnnnnnnnnnnnnnnnnnnnnnnnnnnnnnnnnnnnnnnnnnnnnnnnnnnnnnnnnnnnnnnnnnnnnnnnnnnnnnnnnnnnnnnnnnnnnnnnnnnnnnnnnnnnnnnnnnnnnnnnnnnnnnnnnnnnnnnnnnnnnnnnnnnnnnnnnnnnnnnnnnnnnnnnnnnnnnnnnnnnnnnnnnnnnnnnnnnnnnnnnnnnnnnnnnnnnnnnnnnnnnnnnnnnnnnnnnnnnnnnnnnnnnnnnnnnnnnnnnnnnnnnnnnnnnnnnnnnnnnnnnnnnnnnnnnnnnnnnnnnnnnnnnnnnnnnnnnnnnnnnnnnnnnnnnnnnnnnnnnnnnnnnnnnnnnnnnnnnnnnnnnnnnnnnnnnnnnnnnnnnnnnnnnnnnnnnnnnnnnnnnnnnnnnnnnnnnnnnnnnnnnnnnnnnnnnnnnnnnnnnnnnnnnnnnnnnnnnnnnnnnnnnnnnnnnnnnnnnnnnnnnnnnnnnnnnnnnnnnnnnnnnnnnnnnnnnnnnnnnnnnnnnnnnnnnnnnnnnnnnnnnnnnnnnnnnnnnnnnnnnnnnnnnnnnnnnnnnnnnnnnnnnnnnnnnnnnnnnnnnnnnnnnnnnnnnnnnnnnnnnnnnnnnnnnnnnnnnnnnnnnnnnnnnnnnnnnnnnnnnnnnnnnnnnnnnnnnnnnnnnnnnnnnnnnnnnnnnnnnnnnnnnnnnnnnnnnnnnnnnnnnnnnnnnnnnnnnnnnnnnnnnnnnnnnnnnnnnnnnnnnnnnnnnnnnnnnnnnnnnnnnnnnnnnnnnnnnnnnnnnnnnnnnnnnnnnnnnnnnnnnnnnnnnnnnnnnnnnnnnnnnnnnnnnnnnnnnnnnnnnnnnnnnnnnnnnnnnnnnnnnnnnnnnnnnnnnnnnnnnnnnnnnnnnnnnnnnnnnnnnnnnnnnnnnnnnnnnnnnnnnnnnnnnnnnnnnnnnnnnnnnnnnnnnnnnnnnnnnnnnnnnnnnnnnnnnnnnnnnnnnnnnnnnnnnnnnnnnnnnnnnnnnnnnnnnnnnnnnnnnnnnnnnnnnnnnnnnnnnnnnnnnnnnnnnnnnnnnnnnnnnnnnnnnnnnnnnnnnnnnnnnnnnnnnnnnnnnnnnnnnnnnnnnnnnnnnnnnnnnnnnnnnnnnnnnnnnnnnnnnnnnnnnnnnnnnnnnnnnnnnnnnnnnnnnnnnnnnnnnnnnnnnnnnnnnnnnnnnnnnnnnnnnnnnnnnnnnnnnnnnnnnnnnnnnnnnnnnnnnnnnnnnnnnnnnnnnnnnnnnnnnnnnnnnnnnnnnnnnnnnnnnnnnnnnnnnnnnnnnnnnnnnnnnnnnnnnnnnnnnnnnnnnnnnnnnnnnnnnnnnnnnnnnnnnnnnnnnnnnnnnnnnnnnnnnnnnnnnnnnnnnnnnnnnnnnnnnnnnnnnnnnnnnnnnnnnnnnnnnnnnnnnnnnnnnnnnnnnnnnnnnnnnnnnnnnnnnnnnnnnnnnnnnnnnnnnnnnnnnnnnnnnnnnnnnnnnnnnnnnnnnnnnnnnnnnnnnnnnnnnnnnnnnnnnnnnnnnnnnnnnnnnnnnnnnnnnnnnnnnnnnnnnnnnnnnnnnnnnnnnnnnnnnnnnnnnnnnnnnnnnnnnnnnnnnnnnnnnnnnnnnnnnnnnnnnnnnnnnnnnnnnnnnnnnnnnnnnnnnnnnnnnnnnnnnnnnnnnnnnnnnnnnnnnnnnnnnnnnnnnnnnnnnnnnnnnnnnnnnnnnnnnnnnnnnnnnnnnnnnnnnnnnnnnnnnnnnnnnnnnnnnnnnnnnnnnnnnnnnnnnnnnnnnnnnnnnnnnnnnnnnnnnnnnnnnnnnnnnnnnnnnnnnnnnnnnnnnnnnnnnnnnnnnnnnnnnnnnnnnnnnnnnnnnnnnnnnnnnnnnnnnnnnnnnnnnnnnnnnnnnnnnnnnnnnnnnnnnnnnnnnnnnnnnnnnnnnnnnnnnnnnnnnnnnnnnnnnnnnnnnnnnnnnnnnnnnnnnnnnnnnnnnnnnnnnnnnnnnnnnnnnnnnnnnnnnnnnnnnnnnnnnnnnnnnnnnnnnnnnnnnnnnnnnnnnnnnnnnnnnnnnnnnnnnnnnnnnnnnnnnnnnnnnnnnnnnnnnnnnnnnnnnnnnnnnnnnnnnnnnnnnnnnnnnnnnnnnnnnnnnnnnnnnnnnnnnnnnnnnnnnnnnnnnnnnnnnnnnnnnnnnnnnnnnnnnnnnnnnnnnnnnnnnnnnnnnnnnnnnnnnnnnnnnnnnnnnnnnnnnnnnnnnnnnnnnnnnnnnnnnnnnnnnnnnnnnnnnnnnnnnnnnnnnnnnnnnnnnnnnnnnnnnnnnnnnnnnnnnnnnnnnnnnnnnnnnnnnnnnnnnnnnnnnnnnnnnnnnnnnnnnnnnnnnnnnnnnnnnnnnnnnnnnnnnnnnnnnnnnnnnnnnnnnnnnnnnnnnnnnnnnnnnnnnnnnnnnnnnnnnnnnnnnnnnnnnnnnnnnnnnnnnnnnnnnnnnnnnnnnnnnnnnnnnnnnnnnnnnnnnnnnnnnnnnnnnnnnnnnnnnnnnnnnnnnnnnnnnnnnnnnnnnnnnnnnnnnnnnnnnnnnnnnnnnnnnnnnnnnnnnnnnnnnnnnnnnnnnnnnnnnnnnnnnnnnnnnnnnnnnnnnnnnnnnnnnnnnnnnnnnnnnnnnnnnnnnnnnnnnnnnnnnnnnnnnnnnnnnnnnnnnnnnnnnnnnnnnnnnnnnnnnnnnnnnnnnnnnnnnnnnnnnnnnnnnnnnnnnnnnnnnnnnnnnnnnnnnnnnnnnnnnnnnnnnnnnnnnnnnnnnnnnnnnnnnnnnnnnnnnnnnnnnnnnnnnnnnnnnnnnnnnnnnnnnnnnnnnnnnnnnnnnnnnnnnnnnnnnnnnnnnnnnnnnnnnnnnnnnnnnnnnnnnnnnnnnnnnnnnnnnnnnnnnnnnnnnnnnnnnnnnnnnnnnnnnnnnnnnnnnnnnnnnnnnnnnnnnnnnnnnnnnnnnnnnnnnnnnnnnnnnnnnnnnnnnnnnnnnnnnnnnnnnnnnnnnnnnnnnnnnnnnnnnnnnnnnnnnnnnnnnnnnnnnnnnnnnnnnnnnnnnnnnnnnnnnnnnnnnnnnnnnnnnnnnnnnnnnnnnnnnnnnnnnnnnnnnnnnnnnnnnnnnnnnnnnnnnnnnnnnnnnnnnnnnnnnnnnnnnnnnnnnnnnnnnnnnnnnnnnnnnnnnnnnnnnnnnnnnnnnnnnnnnnnnnnnnnnnnnnnnnnnnnnnnnnnnnnnnnnnnnnnnnnnnnnnnnnnnnnnnnnnnnnnnnnnnnnnnnnnnnnnnnnnnnnnnnnnnnnnnnnnnnnnnnnnnnnnnnnnnnnnnnnnnnnnnnnnnnnnnnnnnnnnnnnnnnnnnnnnnnnnnnnnnnnnnnnnnnnnnnnnnnnnnnnnnnnnnnnnnnnnnnnnnnnnnnnnnnnnnnnnnnnnnnnnnnnnnnnnnnnnnnnnnnnnnnnnnnnnnnnnnnnnnnnnnnnnnnnnnnnnnnnnnnnnnnnnnnnnnnnnnnnnnnnnnnnnnnnnnnnnnnnnnnnnnnnnnnnnnnnnnnnnnnnnnnnnnnnnnnnnnnnnnnnnnnnnnnnnnnnnnnnnnnnnnnnnnnnnnnnnnnnnnnnnnnnnnnnnnnnnnnnnnnnnnnnnnnnnnnnnnnnnnnnnnnnnnnnnnnnnnnnnnnnnnnnnnnnnnnnnnnnnnnnnnnnnnnnnnnnnnnnnnnnnnnnnnnnnnnnnnnnnnnnnnnnnnnnnnnnnnnnnnnnnnnnnnnnnnnnnnnnnnnnnnnnnnnnnnnnnnnnnnnnnnnnnnnnnnnnnnnnnnnnnnnnnnnnnnnnnnnnnnnnnnnnnnnnnnnnnnnnnnnnnnnnnnnnnnnnnnnnnnnnnnnnnnnnnnnnnnnnnnnnnnnnnnnnnnnnnnnnnnnnnnnnnnnnnnnnnnnnnnnnnnnnnnnnnnnnnnnnnnnnnnnnnnnnnnnnnnnnnnnnnnnnnnnnnnnnnnnnnnnnnnnnnnnnnnnnnnnnnnnnnnnnnnnnnnnnnnnnnnnnnnnnnnnnnnnnnnnnnnnnnnnnnnnnnnnnnnnnnnnnnnnnnnnnnnnnnnnnnnnnnnnnnnnnnnnnnnnnnnnnnnnnnnnnnnnnnnnnnnnnnnnnnnnnnnnnnnnnnnnnnnnnnnnnnnnnnnnnnnnnnnnnnnnnnnnnnnnnnnnnnnnnnnnnnnnnnnnnnnnnnnnnnnnnnnnnnnnnnnnnnnnnnnnnnnnnnnnnnnnnnnnnnnnnnnnnnnnnnnnnnnnnnnnnnnnnnnnnnnnnnnnnnnnnnnnnnnnnnnnnnnnnnnnnnnnnnnnnnnnnnnnnnnnnnnnnnnnnnnnnnnnnnnnnnnnnnnnnnnnnnnnnnnnnnnnnnnnnnnnnnnnnnnnnnnnnnnnnnnnnnnnnnnnnnnnnnnnnnnnnnnnnnnnnnnnnnnnnnnnnnnnnnnnnnnnnnnnnnnnnnnnnnnnnnnnnnnnnnnnnnnnnnnnnnnnnnnnnnnnnnnnnnnnnnnnnnnnnnnnnnnnnnnnnnnnnnnnnnnnnnnnnnnnnnnnnnnnnnnnnnnnnnnnnnnnnnnnnnnnnnnnnnnnnnnnnnnnnnnnnnnnnnnnnnnnnnnnnnnnnnnnnnnnnnnnnnnnnnnnnnnnnnnnnnnnnnnnnnnnnnnnnnnnnnnnnnnnnnnnnnnnnnnnnnnnnnnnnnnnnnnnnnnnnnnnnnnnnnnnnnnnnnnnnnnnnnnnnnnnnnnnnnnnnnnnnnnnnnnnnnnnnnnnnnnnnnnnnnnnnnnnnnnnnnnnnnnnnnnnnnnnnnnnnnnnnnnnnnnnnnnnnnnnnnnnnnnnnnnnnnnnnnnnnnnnnnnnnnnnnnnnnnnnnnnnnnnnnnnnnnnnnnnnnnnnnnnnnnnnnnnnnnnnnnnnnnnnnnnnnnnnnnnnnnnnnnnnnnnnnnnnnnnnnnnnnnnnnnnnnnnnnnnnnnnnnnnnnnnnnnnnnnnnnnnnnnnnnnnnnnnnnnnnnnnnnnnnnnnnnnnnnnnnnnnnnnnnnnnnnnnnnnnnnnnnnnnnnnnnnnnnnnnnnnnnnnnnnnnnnnnnnnnnnnnnnnnnnnnnnnnnnnnnnnnnnnnnnnnnnnnnnnnnnnnnnnnnnnnnnnnnnnnnnnnnnnnnnnnnnnnnnnnnnnnnnnnnnnnnnnnnnnnnnnnnnnnnnnnnnnnnnnnnnnnnnnnnnnnnnnnnnnnnnnnnnnnnnnnnnnnnnnnnnnnnnnnnnnnnnnnnnnnnnnnnnnnnnnnnnnnnnnnnnnnnnnnnnnnnnnnnnnnnnnnnnnnnnnnnnnnnnnnnnnnnnnnnnnnnnnnnnnnnnnnnnnnnnnnnnnnnnnnnnnnnnnnnnnnnnnnnnnnnnnnnnnnnnnnnnnnnnnnnnnnnnnnnnnnnnnnnnnnnnnnnnnnnnnnnnnnnnnnnnnnnnnnnnnnnnnnnnnnnnnnnnnnnnnnnnnnnnnnnnnnnnnnnnnnnnnnnnnnnnnnnnnnnnnnnnnnnnnnnnnnnnnnnnnnnnnnnnnnnnnnnnnnnnnnnnnnnnnnnnnnnnnnnnnnnnnnnnnnnnnnnnnnnnnnnnnnnnnnnnnnnnnnnnnnnnnnnnnnnnnnnnnnnnnnnnnnnnnnnnnnnnnnnnnnnnnnnnnnnnnnnnnnnnnnnnnnnnnnnnnnnnnnnnnnnnnnnnnnnnnnnnnnnnnnnnnnnnnnnnnnnnnnnnnnnnnnnnnnnnnnnnnnnnnnnnnnnnnnnnnnnnnnnnnnnnnnnnnnnnnnnnnnnnnnnnnnnnnnnnnnnnnnnnnnnnnnnnnnnnnnnnnnnnnnnnnnnnnnnnnnnnnnnnnnnnnnnnnnnnnnnnnnnnnnnnnnnnnnnnnnnnnnnnnnnnnnnnnnnnnnnnnnnnnnnnnnnnnnnnnnnnnnnnnnnnnnnnnnnnnnnnnnnnnnnnnnnnnnnnnnnnnnnnnnnnnnnnnnnnnnnnnnnnnnnnnnnnnnnnnnnnnnnnnnnnnnnnnnnnnnnnnnnnnnnnnnnnnnnnnnnnnnnnnnnnnnnnnnnnnnnnnnnnnnnnnnnnnnnnnnnnnnnnnnnnnnnnnnnnnnnnnnnnnnnnnnnnnnnnnnnnnnnnnnnnnnnnnnnnnnnnnnnnnnnnnnnnnnnnnnnnnnnnnnnnnnnnnnnnnnnnnnnnnnnnnnnnnnnnnnnnnnnnnnnnnnnnnnnnnnnnnnnnnnnnnnnnnnnnnnnnnnnnnnnnnnnnnnnnnnnnnnnnnnnnnnnnnnnnnnnnnnnnnnnnnnnnnnnnnnnnnnnnnnnnnnnnnnnnnnnnnnnnnnnnnnnnnnnnnnnnnnnnnnnnnnnnnnnnnnnnnnnnnnnnnnnnnnnnnnnnnnnnnnnnnnnnnnnnnnnnnnnnnnnnnnnnnnnnnnnnnnnnnnnnnnnnnnnnnnnnnnnnnnnnnnnnnnnnnnnnnnnnnnnnnnnnnnnnnnnnnnnnnnnnnnnnnnnnnnnnnnnnnnnnnnnnnnnnnnnnnnnnnnnnnnnnnnnnnnnnnnnnnnnnnnnnnnnnnnnnnnnnnnnnnnnnnnnnnnnnnnnnnnnnnnnnnnnnnnnnnnnnnnnnnnnnnnnnnnnnnnnnnnnnnnnnnnnnnnnnnnnnnnnnnnnnnnnnnnnnnnnnnnnnnnnnnnnnnnnnnnnnnnnnnnnnnnnnnnnnnnnnnnnnnnnnnnnnnnnnnnnnnnnnnnnnnnnnnnnnnnnnnnnnnnnnnnnnnnnnnnnnnnnnnnnnnnnnnnnnnnnnnnnnnnnnnnnnnnnnnnnnnnnnnnnnnnnnnnnnnnnnnnnnnnnnnnnnnnnnnnnnnnnnnnnnnnnnnnnnnnnnnnnnnnnnnnnnnnnnnnnnnnnnnnnnnnnnnnnnnnnnnnnnnnnnnnnnnnnnnnnnnnnnnnnnnnnnnnnnnnnnnnnnnnnnnnnnnnnnnnnnnnnnnnnnnnnnnnnnnnnnnnnnnnnnnnnnnnnnnnnnnnnnnnnnnnnnnnnnnnnnnnnnnnnnnnnnnnnnnnnnnnnnnnnnnnnnnnnnnnnnnnnnnnnnnnnnnnnnnnnnnnnnnnnnnnnnnnnnnnnnnnnnnnnnnnnnnnnnnnnnnnnnnnnnnnnnnnnnnnnnnnnnnnnnnnnnnnnnnnnnnnnnnnnnnnnnnnnnnnnnnnnnnnnnnnnnnnnnnnnnnnnnnnnnnnnnnnnnnnnnnnnnnnnnnnnnnnnnnnnnnnnnnnnnnnnnnnnnnnnnnnnnnnnnnnnnnnnnnnnnnnnnnnnnnnnnnnnnnnnnnnnnnnnnnnnnnnnnnnnnnnnnnnnnnnnnnnnnnnnnnnnnnnnnnnnnnnnnnnnnnnnnnnnnnnnnnnnnnnnnnnnnnnnnnnnnnnnnnnnnnnnnnnnnnnnnnnnnnnnnnnnnnnnnnnnnnnnnnnnnnnnnnnnnnnnnnnnnnnnnnnnnnnnnnnnnnnnnnnnnnnnnnnnnnnnnnnnnnnnnnnnnnnnnnnnnnnnnnnnnnnnnnnnnnnnnnnnnnnnnnnnnnnnnnnnnnnnnnnnnnnnnnnnnnnnnnnnnnnnnnnnnnnnnnnnnnnnnnnnnnnnnnnnnnnnnnnnnnnnnnnnnnnnnnnnnnnnnnnnnnnnnnnnnnnnnnnnnnnnnnnnnnnnnnnnnnnnnnnnnnnnnnnnnnnnnnnnnnnnnnnnnnnnnnnnnnnnnnnnnnnnnnnnnnnnnnnnnnnnnnnnnnnnnnnnnnnnnnnnnnnnnnnnnnnnnnnnnnnnnnnnnnnnnnnnnnnnnnnnnnnnnnnnnnnnnnnnnnnnnnnnnnnnnnnnnnnnnnnnnnnnnnnnnnnnnnnnnnnnnnnnnnnnnnnnnnnnnnnnnnnnnnnnnnnnnnnnnnnnnnnnnnnnnnnnnnnnnnnnnnnnnnnnnnnnnnnnnnnnnnnnnnnnnnnnnnnnnnnnnnnnnnnnnnnnnnnnnnnnnnnnnnnnnnnnnnnnnnnnnnnnnnnnnnnnnnnnnnnnnnnnnnnnnnnnnnnnnnnnnnnnnnnnnnnnnnnnnnnnnnnnnnnnnnnnnnnnnnnnnnnnnnnnnnnnnnnnnnnnnnnnnnnnnnnnnnnnnnnnnnnnnnnnnnnnnnnnnnnnnnnnnnnnnnnnnnnnnnnnnnnnnnnnnnnnnnnnnnnnnnnnnnnnnnnnnnnnnnnnnnnnnnnnnnnnnnnnnnnnnnnnnnnnnnnnnnnnnnnnnnnnnnnnnnnnnnnnnnnnnnnnnnnnnnnnnnnnnnnnnnnnnnnnnnnnnnnnnnnnnnnnnnnnnnnnnnnnnnnnnnnnnnnnnnnnnnnnnnnnnnnnnnnnnnnnnnnnnnnnnnnnnnnnnnnnnnnnnnnnnnnnnnnnnnnnnnnnnnnnnnnnnnnnnnnnnnnnnnnnnnnnnnnnnnnnnnnnnnnnnnnnnnnnnnnnnnnnnnnnnnnnnnnnnnnnnnnnnnnnnnnnnnnnnnnnnnnnnnnnnnnnnnnnnnnnnnnnnnnnnnnnnnnnnnnnnnnnnnnnnnnnnnnnnnnnnnnnnnnnnnnnnnnnnnnnnnnnnnnnnnnnnnnnnnnnnnnnnnnnnnnnnnnnnnnnnnnnnnnnnnnnnnnnnnnnnnnnnnnnnnnnnnnnnnnnnnnnnnnnnnnnnnnnnnnnnnnnnnnnnnnnnnnnnnnnnnnnnnnnnnnnnnnnnnnnnnnnnnnnnnnnnnnnnnnnnnnnnnnnnnnnnnnnnnnnnnnnnnnnnnnnnnnnnnnnnnnnnnnnnnnnnnnnnnnnnnnnnnnnnnnnnnnnnnnnnnnnnnnnnnnnnnnnnnnnnnnnnnnnnnnnnnnnnnnnnnnnnnnnnnnnnnnnnnnnnnnnnnnnnnnnnnnnnnnnnnnnnnnnnnnnnnnnnnnnnnnnnnnnnnnnnnnnnnnnnnnnnnnnnnnnnnnnnnnnnnnnnnnnnnnnnnnnnnnnnnnnnnnnnnnnnnnnnnnnnnnnnnnnnnnnnnnnnnnnnnnnnnnnnnnnnnnnnnnnnnnnnnnnnnnnnnnnnnnnnnnnnnnnnnnnnnnnnnnnnnnnnnnnnnnnnnnnnnnnnnnnnnnnnnnnnnnnnnnnnnnnnnnnnnnnnnnnnnnnnnnnnnnnnnnnnnnnnnnnnnnnnnnnnnnnnnnnnnnnnnnnnnnnnnnnnnnnnnnnnnnnnnnnnnnnnnnnnnnnnnnnnnnnnnnnnnnnnnnnnnnnnnnnnnnnnnnnnnnnnnnnnnnnnnnnnnnnnnnnnnnnnnnnnnnnnnnnnnnnnnnnnnnnnnnnnnnnnnnnnnnnnnnnnnnnnnnnnnnnnnnnnnnnnnnnnnnnnnnnnnnnnnnnnnnnnnnnnnnnnnnnnnnnnnnnnnnnnnnnnnnnnnnnnnnnnnnnnnnnnnnnnnnnnnnnnnnnnnnnnnnnnnnnnnnnnnnnnnnnnnnnnnnnnnnnnnnnnnnnnnnnnnnnnnnnnnnnnnnnnnnnnnnnnnnnnnnnnnnnnnnnnnnnnnnnnnnnnnnnnnnnnnnnnnnnnnnnnnnnnnnnnnnnnnnnnnnnnnnnnnnnnnnnnnnnnnnnnnnnnnnnnnnnnnnnnnnnnnnnnnnnnnnnnnnnnnnnnnnnnnnnnnnnnnnnnnnnnnnnnnnnnnnnnnnnnnnnnnnnnnnnnnnnnnnnnnnnnnnnnnnnnnnnnnnnnnnnnnnnnnnnnnnnnnnnnnnnnnnnnnnnnnnnnnnnnnnnnnnnnnnnnnnnnnnnnnnnnnnnnnnnnnnnnnnnnnnnnnnnnnnnnnnnnnnnnnnnnnnnnnnnnnnnnnnnnnnnnnnnnnnnnnnnnnnnnnnnnnnnnnnnnnnnnnnnnnnnnnnnnnnnnnnnnnnnnnnnnnnnnnnnnnnnnnnnnnnnnnnnnnnnnnnnnnnnnnnnnnnnnnnnnnnnnnnnnnnnnnnnnnnnnnnnnnnnnnnnnnnnnnnnnnnnnnnnnnnnnnnnnnnnnnnnnnnnnnnnnnnnnnnnnnnnnnnnnnnnnnnnnnnnnnnnnnnnnnnnnnnnnnnnnnnnnnnnnnnnnnnnnnnnnnnnnnnnnnnnnnnnnnnnnnnnnnnnnnnnnnnnnnnnnnnnnnnnnnnnnnnnnnnnnnnnnnnnnnnnnnnnnnnnnnnnnnnnnnnnnnnnnnnnnnnnnnnnnnnnnnnnnnnnnnnnnnnnnnnnnnnnnnnnnnnnnnnnnnnnnnnnnnnnnnnnnnnnnnnnnnnnnnnnnnnnnnnnnnnnnnnnnnnnnnnnnnnnnnnnnnnnnnnnnnnnnnnnnnnnnnnnnnnnnnnnnnnnnnnnnnnnnnnnnnnnnnnnnnnnnnnnnnnnnnnnnnnnnnnnnnnnnnnnnnnnnnnnnnnnnnnnnnnnnnnnnnnnnnnnnnnnnnnnnnnnnnnnnnnnnnnnnnnnnnnnnnnnnnnnnnnnnnnnnnnnnnnnnnnnnnnnnnnnnnnnnnnnnnnnnnnnnnnnnnnnnnnnnnnnnnnnnnnnnnnnnnnnnnnnnnnnnnnnnnnnnnnnnnnnnnnnnnnnnnnnnnnnnnnnnnnnnnnnnnnnnnnnnnnnnnnnnnnnnnnnnnnnnnnnnnnnnnnnnnnnnnnnnnnnnnnnnnnnnnnnnnnnnnnnnnnnnnnnnnnnnnnnnnnnnnnnnnnnnnnnnnnnnnnnnnnnnnnnnnnnnnnnnnnnnnnnnnnnnnnnnnnnnnnnnnnnnnnnnnnnnnnnnnnnnnnnnnnnnnnnnnnnnnnnnnnnnnnnnnnnnnnnnnnnnnnnnnnnnnnnnnnnnnnnnnnnnnnnnnnnnnnnnnnnnnnnnnnnnnnnnnnnnnnnnnnnnnnnnnnnnnnnnnnnnnnnnnnnnnnnnnnnnnnnnnnnnnnnnnnnnnnnnnnnnnnnnnnnnnnnnnnnnnnnnnnnnnnnnnnnnnnnnnnnnnnnnnnnnnnnnnnnnnnnnnnnnnnnnnnnnnnnnnnnnnnnnnnnnnnnnnnnnnnnnnnnnnnnnnnnnnnnnnnnnnnnnnnnnnnnnnnnnnnnnnnnnnnnnnnnnnnnnnnnnnnnnnnnnnnnnnnnnnnnnnnnnnnnnnnnnnnnnnnnnnnnnnnnnnnnnnnnnnnnnnnnnnnnnnnnnnnnnnnnnnnnnnnnnnnnnnnnnnnnnnnnnnnnnnnnnnnnnnnnnnnnnnnnnnnnnnnnnnnnnnnnnnnnnnnnnnnnnnnnnnnnnnnnnnnnnnnnnnnnnnnnnnnnnnnnnnnnnnnnnnnnnnnnnnnnnnnnnnnnnnnnnnnnnnnnnnnnnnnnnnnnnnnnnnnnnnnnnnnnnnnnnnnnnnnnnnnnnnnnnnnnnnnnnnnnnnnnnnnnnnnnnnnnnnnnnnnnnnnnnnnnnnnnnnnnnnnnnnnnnnnnnnnnnnnnnnnnnnnnnnnnnnnnnnnnnnnnnnnnnnnnnnnnnnnnnnnnnnnnnnnnnnnnnnnnnnnnnnnnnnnnnnnnnnnnnnnnnnnnnnnnnnnnnnnnnnnnnnnnnnnnnnnnnnnnnnnnnnnnnnnnnnnnnnnnnnnnnnnnnnnnnnnnnnnnnnnnnnnnnnnnnnnnnnnnnnnnnnnnnnnnnnnnnnnnnnnnnnnnnnnnnnnnnnnnnnnnnnnnnnnnnnnnnnnnnnnnnnnnnnnnnnnnnnnnnnnnnnnnnnnnnnnnnnnnnnnnnnnnnnnnnnnnnnnnnnnnnnnnnnnnnnnnnnnnnnnnnnnnnnnnnnnnnnnnnnnnnnnnnnnnnnnnnnnnnnnnnnnnnnnnnnnnnnnnnnnnnnnnnnnnnnnnnnnnnnnnnnnnnnnnnnnnnnnnnnnnnnnnnnnnnnnnnnnnnnnnnnnnnnnnnnnnnnnnnnnnnnnnnnnnnnnnnnnnnnnnnnnnnnnnnnnnnnnnnnnnnnnnnnnnnnnnnnnnnnnnnnnnnnnnnnnnnnnnnnnnnnnnnnnnnnnnnnnnnnnnnnnnnnnnnnnnnnnnnnnnnnnnnnnnnnnnnnnnnnnnnnnnnnnnnnnnnnnnnnnnnnnnnnnnnnnnnnnnnnnnnnnnnnnnnnnnnnnnnnnnnnnnnnnnnnnnnnnnnnnnnnnnnnnnnnnnnnnnnnnnnnnnnnnnnnnnnnnnnnnnnnnnnnnnnnnnnnnnnnnnnnnnnnnnnnnnnnnnnnnnnnnnnnnnnnnnnnnnnnnnnnnnnnnnnnnnnnnnnnnnnnnnnnnnnnnnnnnnnnnnnnnnnnnnnnnnnnnnnnnnnnnnnnnnnnnnnnnnnnnnnnnnnnnnnnnnnnnnnnnnnnnnnnnnnnnnnnnnnnnnnnnnnnnnnnnnnnnnnnnnnnnnnnnnnnnnnnnnnnnnnnnnnnnnnnnnnnnnnnnnnnnnnnnnnnnnnnnnnnnnnnnnnnnnnnnnnnnnnnnnnnnnnnnnnnnnnnnnnnnnnnnnnnnnnnnnnnnnnnnnnnnnnnnnnnnnnnnnnnnnnnnnnnnnnnnnnnnnnnnnnnnnnnnnnnnnnnnnnnnnnnnnnnnnnnnnnnnnnnnnnnnnnnnnnnnnnnnnnnnnnnnnnnnnnnnnnnnnnnnnnnnnnnnnnnnnnnnnnnnnnnnnnnnnnnnnnnnnnnnnnnnnnnnnnnnnnnnnnnnnnnnnnnnnnnnnnnnnnnnnnnnnnnnnnnnnnnnnnnnnnnnnnnnnnnnnnnnnnnnnnnnnnnnnnnnnnnnnnnnnnnnnnnnnnnnnnnnnnnnnnnnnnnnnnnnnnnnnnnnnnnnnnnnnnnnnnnnnnnnnnnnnnnnnnnnnnnnnnnnnnnnnnnnnnnnnnnnnnnnnnnnnnnnnnnnnnnnnnnnnnnnnnnnnnnnnnnnnnnnnnnnnnnnnnnnnnnnnnnnnnnnnnnnnnnnnnnnnnnnnnnnnnnnnnnnnnnnnnnnnnnnnnnnnnnnnnnnnnnnnnnnnnnnnnnnnnnnnnnnnnnnnnnnnnnnnnnnnnnnnnnnnnnnnnnnnnnnnnnnnnnnnnnnnnnnnnnnnnnnnnnnnnnnnnnnnnnnnnnnnnnnnnnnnnnnnnnnnnnnnnnnnnnnnnnnnnnnnnnnnnnnnnnnnnnnnnnnnnnnnnnnnnnnnnnnnnnnnnnnnnnnnnnnnnnnnnnnnnnnnnnnnnnnnnnnnnnnnnnnnnnnnnnnnnnnnnnnnnnnnnnnnnnnnnnnnnnnnnnnnnnnnnnnnnnnnnnnnnnnnnnnnnnnnnnnnnnnnnnnnnnnnnnnnnnnnnnnnnnnnnnnnnnnnnnnnnnnnnnnnnnnnnnnnnnnnnnnnnnnnnnnnnnnnnnnnnnnnnnnnnnnnnnnnnnnnnnnnnnnnnnnnnnnnnnnnnnnnnnnnnnnnnnnnnnnnnnnnnnnnnnnnnnnnnnnnnnnnnnnnnnnnnnnnnnnnnnnnnnnnnnnnnnnnnnnnnnnnnnnnnnnnnnnnnnnnnnnnnnnnnnnnnnnnnnnnnnnnnnnnnnnnnnnnnnnnnnnnnnnnnnnnnnnnnnnnnnnnnnnnnnnnnnnnnnnnnnnnnnnnnnnnnnnnnnnnnnnnnnnnnnnnnnnnnnnnnnnnnnnnnnnnnnnnnnnnnnnnnnnnnnnnnnnnnnnnnnnnnnnnnnnnnnnnnnnnnnnnnnnnnnnnnnnnnnnnnnnnnnnnnnnnnnnnnnnnnnnnnnnnnnnnnnnnnnnnnnnnnnnnnnnnnnnnnnnnnnnnnnnnnnnnnnnnnnnnnnnnnnnnnnnnnnnnnnnnnnnnnnnnnnnnnnnnnnnnnnnnnnnnnnnnnnnnnnnnnnnnnnnnnnnnnnnnnnnnnnnnnnnnnnnnnnnnnnnnnnnnnnnnnnnnnnnnnnnnnnnnnnnnnnnnnnnnnnnnnnnnnnnnnnnnnnnnnnnnnnnnnnnnnnnnnnnnnnnnnnnnnnnnnnnnnnnnnnnnnnnnnnnnnnnnnnnnnnnnnnnnnnnnnnnnnnnnnnnnnnnnnnnnnnnnnnnnnnnnnnnnnnnnnnnnnnnnnnnnnnnnnnnnnnnnnnnnnnnnnnnnnnnnnnnnnnnnnnnnnnnnnnnnnnnnnnnnnnnnnnnnnnnnnnnnnnnnnnnnnnnnnnnnnnnnnnnnnnnnnnnnnnnnnnnnnnnnnnnnnnnnnnnnnnnnnnnnnnnnnnnnnnnnnnnnnnnnnnnnnnnnnnnnnnnnnnnnnnnnnnnnnnnnnnnnnnnnnnnnnnnnnnnnnnnnnnnnnnnnnnnnnnnnnnnnnnnnnnnnnnnnnnnnnnnnnnnnnnnnnnnnnnnnnnnnnnnnnnnnnnnnnnnnnnnnnnnnnnnnnnnnnnnnnnnnnnnnnnnnnnnnnnnnnnnnnnnnnnnnnnnnnnnnnnnnnnnnnnnnnnnnnnnnnnnnnnnnnnnnnnnnnnnnnnnnnnnnnnnnnnnnnnnnnnnnnnnnnnnnnnnnnnnnnnnnnnnnnnnnnnnnnnnnnnnnnnnnnnnnnnnnnnnnnnnnnnnnnnnnnnnnnnnnnnnnnnnnnnnnnnnnnnnnnnnnnnnnnnnnnnnnnnnnnnnnnnnnnnnnnnnnnnnnnnnnnnnnnnnnnnnnnnnnnnnnnnnnnnnnnnnnnnnnnnnnnnnnnnnnnnnnnnnnnnnnnnnnnnnnnnnnnnnnnnnnnnnnnnnnnnnnnnnnnnnnnnnnnnnnnnnnnnnnnnnnnnnnnnnnnnnnnnnnnnnnnnnnnnnnnnnnnnnnnnnnnnnnnnnnnnnnnnnnnnnnnnnnnnnnnnnnnnnnnnnnnnnnnnnnnnnnnnnnnnnnnnnnnnnnnnnnnnnnnnnnnnnnnnnnnnnnnnnnnnnnnnnnnnnnnnnnnnnnnnnnnnnnnnnnnnnnnnnnnnnnnnnnnnnnnnnnnnnnnnnnnnnnnnnnnnnnnnnnnnnnnnnnnnnnnnnnnnnnnnnnnnnnnnnnnnnnnnnnnnnnnnnnnnnnnnnnnnnnnnnnnnnnnnnnnnnnnnnnnnnnnnnnnnnnnnnnnnnnnnnnnnnnnnnnnnnnnnnnnnnnnnnnnnnnnnnnnnnnnnnnnnnnnnnnnnnnnnnnnnnnnnnnnnnnnnnnnnnnnnnnnnnnnnnnnnnnnnnnnnnnnnnnnnnnnnnnnnnnnnnnnnnnnnnnnnnnnnnnnnnnnnnnnnnnnnnnnnnnnnnnnnnnnnnnnnnnnnnnnnnnnnnnnnnnnnnnnnnnnnnnnnnnnnnnnnnnnnnnnnnnnnnnnnnnnnnnnnnnnnnnnnnnnnnnnnnnnnnnnnnnnnnnnnnnnnnnnnnnnnnnnnnnnnnnnnnnnnnnnnnnnnnnnnnnnnnnnnnnnnnnnnnnnnnnnnnnnnnnnnnnnnnnnnnnnnnnnnnnnnnnnnnnnnnnnnnnnnnnnnnnnnnnnnnnnnnnnnnnnnnnnnnnnnnnnnnnnnnnnnnnnnnnnnnnnnnnnnnnnnnnnnnnnnnnnnnnnnnnnnnnnnnnnnnnnnnnnnnnnnnnnnnnnnnnnnnnnnnnnnnnnnnnnnnnnnnnnnnnnnnnnnnnnnnnnnnnnnnnnnnnnnnnnnnnnnnnnnnnnnnnnnnnnnnnnnnnnnnnnnnnnnnnnnnnnnnnnnnnnnnnnnnnnnnnnnnnnnnnnnnnnnnnnnnnnnnnnnnnnnnnnnnnnnnnnnnnnnnnnnnnnnnnnnnnnnnnnnnnnnnnnnnnnnnnnnnnnnnnnnnnnnnnnnnnnnnnnnnnnnnnnnnnnnnnnnnnnnnnnnnnnnnnnnnnnnnnnnnnnnnnnnnnnnnnnnnnnnnnnnnnnnnnnnnnnnnnnnnnnnnnnnnnnnnnnnnnnnnnnnnnnnnnnnnnnnnnnnnnnnnnnnnnnnnnnnnnnnnnnnnnnnnnnnnnnnnnnnnnnnnnnnnnnnnnnnnnnnnnnnnnnnnnnnnnnnnnnnnnnnnnnnnnnnnnnnnnnnnnnnnnnnnnnnnnnnnnnnnnnnnnnnnnnnnnnnnnnnnnnnnnnnnnnnnnnnnnnnnnnnnnnnnnnnnnnnnnnnnnnnnnnnnnnnnnnnnnnnnnnnnnnnnnnnnnnnnnnnnnnnnnnnnnnnnnnnnnnnnnnnnnnnnnnnnnnnnnnnnnnnnnnnnnnnnnnnnnnnnnnnnnnnnnnnnnnnnnnnnnnnnnnnnnnnnnnnnnnnnnnnnnnnnnnnnnnnnnnnnnnnnnnnnnnnnnnnnnnnnnnnnnnnnnnnnnnnnnnnnnnnnnnnnnnnnnnnnnnnnnnnnnnnnnnnnnnnnnnnnnnnnnnnnnnnnnnnnnnnnnnnnnnnnnnnnnnnnnnnnnnnnnnnnnnnnnnnnnnnnnnnnnnnnnnnnnnnnnnnnnnnnnnnnnnnnnnnnnnnnnnnnnnnnnnnnnnnnnnnnnnnnnnnnnnnnnnnnnnnnnnnnnnnnnnnnnnnnnnnnnnnnnnnnnnnnnnnnnnnnnnnnnnnnnnnnnnnnnnnnnnnnnnnnnnnnnnnnnnnnnnnnnnnnnnnnnnnnnnnnnnnnnnnnnnnnnnnnnnnnnnnnnnnnnnnnnnnnnnnnnnnnnnnnnnnnnnnnnnnnnnnnnnnnnnnnnnnnnnnnnnnnnnnnnnnnnnnnnnnnnnnnnnnnnnnnnnnnnnnnnnnnnnnnnnnnnnnnnnnnnnnnnnnnnnnnnnnnnnnnnnnnnnnnnnnnnnnnnnnnnnnnnnnnnnnnnnnnnnnnnnnnnnnnnnnnnnnnnnnnnnnnnnnnnnnnnnnnnnnnnnnnnnnnnnnnnnnnnnnnnnnnnnnnnnnnnnnnnnnnnnnnnnnnnnnnnnnnnnnnnnnnnnnnnnnnnnnnnnnnnnnnnnnnnnnnnnnnnnnnnnnnnnnnnnnnnnnnnnnnnnnnnnnnnnnnnnnnnnnnnnnnnnnnnnnnnnnnnnnnnnnnnnnnnnnnnnnnnnnnnnnnnnnnnnnnnnnnnnnnnnnnnnnnnnnnnnnnnnnnnnnnnnnnnnnnnnnnnnnnnnnnnnnnnnnnnnnnnnnnnnnnnnnnnnnnnnnnnnnnnnnnnnnnnnnnnnnnnnnnnnnnnnnnnnnnnnnnnnnnnnnnnnnnnnnnnnnnnnnnnnnnnnnnnnnnnnnnnnnnnnnnnnnnnnnnnnnnnnnnnnnnnnnnnnnnnnnnnnnnnnnnnnnnnnnnnnnnnnnnnnnnnnnnnnnnnnnnnnnnnnnnnnnnnnnnnnnnnnnnnnnnnnnnnnnnnnnnnnnnnnnnnnnnnnnnnnnnnnnnnnnnnnnnnnnnnnnnnnnnnnnnnnnnnnnnnnnnnnnnnnnnnnnnnnnnnnnnnnnnnnnnnnnnnnnnnnnnnnnnnnnnnnnnnnnnnnnnnnnnnnnnnnnnnnnnnnnnnnnnnnnnnnnnnnnnnnnnnnnnnnnnnnnnnnnnnnnnnnnnnnnnnnnnnnnnnnnnnnnnnnnnnnnnnnnnnnnnnnnnnnnnnnnnnnnnnnnnnnnnnnnnnnnnnnnnnnnnnnnnnnnnnnnnnnnnnnnnnnnnnnnnnnnnnnnnnnnnnnnnnnnnnnnnnnnnnnnnnnnnnnnnnnnnnnnnnnnnnnnnnnnnnnnnnnnnnnnnnnnnnnnnnnnnnnnnnnnnnnnnnnnnnnnnnnnnnnnnnnnnnnnnnnnnnnnnnnnnnnnnnnnnnnnnnnnnnnnnnnnnnnnnnnnnnnnnnnnnnnnnnnnnnnnnnnnnnnnnnnnnnnnnnnnnnnnnnnnnnnnnnnnnnnnnnnnnnnnnnnnnnnnnnnnnnnnnnnnnnnnnnnnnnnnnnnnnnnnnnnnnnnnnnnnnnnnnnnnnnnnnnnnnnnnnnnnnnnnnnnnnnnnnnnnnnnnnnnnnnnnnnnnnnnnnnnnnnnnnnnnnnnnnnnnnnnnnnnnnnnnnnnnnnnnnnnnnnnnnnnnnnnnnnnnnnnnnnnnnnnnnnnnnnnnnnnnnnnnnnnnnnnnnnnnnnnnnnnnnnnnnnnnnnnnnnnnnnnnnnnnnnnnnnnnnnnnnnnnnnnnnnnnnnnnnnnnnnnnnnnnnnnnnnnnnnnnnnnnnnnnnnnnnnnnnnnnnnnnnnnnnnnnnnnnnnnnnnnnnnnnnnnnnnnnnnnnnnnnnnnnnnnnnnnnnnnnnnnnnnnnnnnnnnnnnnnnnnnnnnnnnnnnnnnnnnnnnnnnnnnnnnnnnnnnnnnnnnnnnnnnnnnnnnnnnnnnnnnnnnnnnnnnnnnnnnnnnnnnnnnnnnnnnnnnnnnnnnnnnnnnnnnnnnnnnnnnnnnnnnnnnnnnnnnnnnnnnnnnnnnnnnnnnnnnnnnnnnnnnnnnnnnnnnnnnnnnnnnnnnnnnnnnnnnnnnnnnnnnnnnnnnnnnnnnnnnnnnnnnnnnnnnnnnnnnnnnnnnnnnnnnnnnnnnnnnnnnnnnnnnnnnnnnnnnnnnnnnnnnnnnnnnnnnnnnnnnnnnnnnnnnnnnnnnnnnnnnnnnnnnnnnnnnnnnnnnnnnnnnnnnnnnnnnnnnnnnnnnnnnnnnnnnnnnnnnnnnnnnnnnnnnnnnnnnnnnnnnnnnnnnnnnnnnnnnnnnnnnnnnnnnnnnnnnnnnnnnnnnnnnnnnnnnnnnnnnnnnnnnnnnnnnnnnnnnnnnnnnnnnnnnnnnnnnnnnnnnnnnnnnnnnnnnnnnnnnnnnnnnnnnnnnnnnnnnnnnnnnnnnnnnnnnnnnnnnnnnnnnnnnnnnnnnnnnnnnnnnnnnnnnnnnnnnnnnnnnnnnnnnnnnnnnnnnnnnnnnnnnnnnnnnnnnnnnnnnnnnnnnnnnnnnnnnnnnnnnnnnnnnnnnnnnnnnnnnnnnnnnnnnnnnnnnnnnnnnnnnnnnnnnnnnnnnnnnnnnnnnnnnnnnnnnnnnnnnnnnnnnnnnnnnnnnnnnnnnnnnnnnnnnnnnnnnnnnnnnnnnnnnnnnnnnnnnnnnnnnnnnnnnnnnnnnnnnnnnnnnnnnnnnnnnnnnnnnnnnnnnnnnnnnnnnnnnnnnnnnnnnnnnnnnnnnnnnnnnnnnnnnnnnnnnnnnnnnnnnnnnnnnnnnnnnnnnnnnnnnnnnnnnnnnnnnnnnnnnnnnnnnnnnnnnnnnnnnnnnnnnnnnnnnnnnnnnnnnnnnnnnnnnnnnnnnnnnnnnnnnnnnnnnnnnnnnnnnnnnnnnnnnnnnnnnnnnnnnnnnnnnnnnnnnnnnnnnnnnnnnnnnnnnnnnnnnnnnnnnnnnnnnnnnnnnnnnnnnnnnnnnnnnnnnnnnnnnnnnnnnnnnnnnnnnnnnnnnnnnnnnnnnnnnnnnnnnnnnnnnnnnnnnnnnnnnnnnnnnnnnnnnnnnnnnnnnnnnnnnnnnnnnnnnnnnnnnnnnnnnnnnnnnnnnnnnnnnnnnnnnnnnnnnnnnnnnnnnnnnnnnnnnnnnnnnnnnnnnnnnnnnnnnnnnnnnnnnnnnnnnnnnnnnnnnnnnnnnnnnnnnnnnnnnnnnnnnnnnnnnnnnnnnnnnnnnnnnnnnnnnnnnnnnnnnnnnnnnnnnnnnnnnnnnnnnnnnnnnnnnnnnnnnnnnnnnnnnnnnnnnnnnnnnnnnnnnnnnnnnnnnnnnnnnnnnnnnnnnnnnnnnnnnnnnnnnnnnnnnnnnnnnnnnnnnnnnnnnnnnnnnnnnnnnnnnnnnnnnnnnnnnnnnnnnnnnnnnnnnnnnnnnnnnnnnnnnnnnnnnnnnnnnnnnnnnnnnnnnnnnnnnnnnnnnnnnnnnnnnnnnnnnnnnnnnnnnnnnnnnnnnnnnnnnnnnnnnnnnnnnnnnnnnnnnnnnnnnnnnnnnnnnnnnnnnnnnnnnnnnnnnnnnnnnnnnnnnnnnnnnnnnnnnnnnnnnnnnnnnnnnnnnnnnnnnnnnnnnnnnnnnnnnnnnnnnnnnnnnnnnnnnnnnnnnnnnnnnnnnnnnnnnnnnnnnnnnnnnnnnnnnnnnnnnnnnnnnnnnnnnnnnnnnnnnnnnnnnnnnnnnnnnnnnnnnnnnnnnnnnnnnnnnnnnnnnnnnnnnnnnnnnnnnnnnnnnnnnnnnnnnnnnnnnnnnnnnnnnnnnnnnnnnnnnnnnnnnnnnnnnnnnnnnnnnnnnnnnnnnnnnnnnnnnnnnnnnnnnnnnnnnnnnnnnnnnnnnnnnnnnnnnnnnnnnnnnnnnnnnnnnnnnnnnnnnnnnnnnnnnnnnnnnnnnnnnnnnnnnnnnnnnnnnnnnnnnnnnnnnnnnnnnnnnnnnnnnnnnnnnnnnnnnnnnnnnnnnnnnnnnnnnnnnnnnnnnnnnnnnnnnnnnnnnnnnnnnnnnnnnnnnnnnnnnnnnnnnnnnnnnnnnnnnnnnnnnnnnnnnnnnnnnnnnnnnnnnnnnnnnnnnnnnnnnnnnnnnnnnnnnnnnnnnnnnnnnnnnnnnnnnnnnnnnnnnnnnnnnnnnnnnnnnnnnnnnnnnnnnnnnnnnnnnnnnnnnnnnnnnnnnnnnnnnnnnnnnnnnnnnnnnnnnnnnnnnnnnnnnnnnnnnnnnnnnnnnnnnnnnnnnnnnnnnnnnnnnnnnnnnnnnnnnnnnnnnnnnnnnnnnnnnnnnnnnnnnnnnnnnnnnnnnnnnnnnnnnnnnnnnnnnnnnnnnnnnnnnnnnnnnnnnnnnnnnnnnnnnnnnnnnnnnnnnnnnnnnnnnnnnnnnnnnnnnnnnnnnnnnnnnnnnnnnnnnnnnnnnnnnnnnnnnnnnnnnnnnnnnnnnnnnnnnnnnnnnnnnnnnnnnnnnnnnnnnnnnnnnnnnnnnnnnnnnnnnnnnnnnnnnnnnnnnnnnnnnnnnnnnnnnnnnnnnnnnnnnnnnnnnnnnnnnnnnnnnnnnnnnnnnnnnnnnnnnnnnnnnnnnnnnnnnnnnnnnnnnnnnnnnnnnnnnnnnnnnnnnnnnnnnnnnnnnnnnnnnnnnnnnnnnnnnnnnnnnnnnnnnnnnnnnnnnnnnnnnnnnnnnnnnnnnnnnnnnnnnnnnnnnnnnnnnnnnnnnnnnnnnnnnnnnnnnnnnnnnnnnnnnnnnnnnnnnnnnnnnnnnnnnnnnnnnnnnnnnnnnnnnnnnnnnnnnnnnnnnnnnnnnnnnnnnnnnnnnnnnnnnnnnnnnnnnnnnnnnnnnnnnnnnnnnnnnnnnnnnnnnnnnnnnnnnnnnnnnnnnnnnnnnnnnnnnnnnnnnnnnnnnnnnnnnnnnnnnnnnnnnnnnnnnnnnnnnnnnnnnnnnnnnnnnnnnnnnnnnnnnnnnnnnnnnnnnnnnnnnnnnnnnnnnnnnnnnnnnnnnnnnnnnnnnnnnnnnnnnnnnnnnnnnnnnnnnnnnnnnnnnnnnnnnnnnnnnnnnnnnnnnnnnnnnnnnnnnnnnnnnnnnnnnnnnnnnnnnnnnnnnnnnnnnnnnnnnnnnnnnnnnnnnnnnnnnnnnnnnnnnnnnnnnnnnnnnnnnnnnnnnnnnnnnnnnnnnnnnnnnnnnnnnnnnnnnnnnnnnnnnnnnnnnnnnnnnnnnnnnnnnnnnnnnnnnnnnnnnnnnnnnnnnnnnnnnnnnnnnnnnnnnnnnnnnnnnnnnnnnnnnnnnnnnnnnnnnnnnnnnnnnnnnnnnnnnnnnnnnnnnnnnnnnnnnnnnnnnnnnnnnnnnnnnnnnnnnnnnnnnnnnnnnnnnnnnnnnnnnnnnnnnnnnnnnnnnnnnnnnnnnnnnnnnnnnnnnnnnnnnnnnnnnnnnnnnnnnnnnnnnnnnnnnnnnnnnnnnnnnnnnnnnnnnnnnnnnnnnnnnnnnnnnnnnnnnnnnnnnnnnnnnnnnnnnnnnnnnnnnnnnnnnnnnnnnnnnnnnnnnnnnnnnnnnnnnnnnnnnnnnnnnnnnnnnnnnnnnnnnnnnnnnnnnnnnnnnnnnnnnnnnnnnnnnnnnnnnnnnnnnnnnnnnnnnnnnnnnnnnnnnnnnnnnnnnnnnnnnnnnnnnnnnnnnnnnnnnnnnnnnnnnnnnnnnnnnnnnnnnnnnnnnnnnnnnnnnnnnnnnnnnnnnnnnnnnnnnnnnnnnnnnnnnnnnnnnnnnnnnnnnnnnnnnnnnnnnnnnnnnnnnnnnnnnnnnnnnnnnnnnnnnnnnnnnnnnnnnnnnnnnnnnnnnnnnnnnnnnnnnnnnnnnnnnnnnnnnnnnnnnnnnnnnnnnnnnnnnnnnnnnnnnnnnnnnnnnnnnnnnnnnnnnnnnnnnnnnnnnnnnnnnnnnnnnnnnnnnnnnnnnnnnnnnnnnnnnnnnnnnnnnnnnnnnnnnnnnnnnnnnnnnnnnnnnnnnnnnnnnnnnnnnnnnnnnnnnnnnnnnnnnnnnnnnnnnnnnnnnnnnnnnnnnnnnnnnnnnnnnnnnnnnnnnnnnnnnnnnnnnnnnnnnnnnnnnnnnnnnnnnnnnnnnnnnnnnnnnnnnnnnnnnnnnnnnnnnnnnnnnnnnnnnnnnnnnnnnnnnnnnnnnnnnnnnnnnnnnnnnnnnnnnnnnnnnnnnnnnnnnnnnnnnnnnnnnnnnnnnnnnnnnnnnnnnnnnnnnnnnnnnnnnnnnnnnnnnnnnnnnnnnnnnnnnnnnnnnnnnnnnnnnnnnnnnnnnnnnnnnnnnnnnnnnnnnnnnnnnnnnnnnnnnnnnnnnnnnnnnnnnnnnnnnnnnnnnnnnnnnnnnnnnnnnnnnnnnnnnnnnnnnnnnnnnnnnnnnnnnnnnnnnnnnnnnnnnnnnnnnnnnnnnnnnnnnnnnnnnnnnnnnnnnnnnnnnnnnnnnnnnnnnnnnnnnnnnnnnnnnnnnnnnnnnnnnnnnnnnnnnnnnnnnnnnnnnnnnnnnnnnnnnnnnnnnnnnnnnnnnnnnnnnnnnnnnnnnnnnnnnnnnnnnnnnnnnnnnnnnnnnnnnnnnnnnnnnnnnnnnnnnnnnnnnnnnnnnnnnnnnnnnnnnnnnnnnnnnnnnnnnnnnnnnnnnnnnnnnnnnnnnnnnnnnnnnnnnnnnnnnnnnnnnnnnnnnnnnnnnnnnnnnnnnnnnnnnnnnnnnnnnnnnnnnnnnnnnnnnnnnnnnnnnnnnnnnnnnnnnnnnnnnnnnnnnnnnnnnnnnnnnnnnnnnnnnnnnnnnnnnnnnnnnnnnnnnnnnnnnnnnnnnnnnnnnnnnnnnnnnnnnnnnnnnnnnnnnnnnnnnnnnnnnnnnnnnnnnnnnnnnnnnnnnnnnnnnnnnnnnnnnnnnnnnnnnnnnnnnnnnnnnnnnnnnnnnnnnnnnnnnnnnnnnnnnnnnnnnnnnnnnnnnnnnnnnnnnnnnnnnnnnnnnnnnnnnnnnnnnnnnnnnnnnnnnnnnnnnnnnnnnnnnnnnnnnnnnnnnnnnnnnnnnnnnnnnnnnnnnnnnnnnnnnnnnnnnnnnnnnnnnnnnnnnnnnnnnnnnnnnnnnnnnnnnnnnnnnnnnnnnnnnnnnnnnnnnnnnnnnnnnnnnnnnnnnnnnnnnnnnnnnnnnnnnnnnnnnnnnnnnnnnnnnnnnnnnnnnnnnnnnnnnnnnnnnnnnnnnnnnnnnnnnnnnnnnnnnnnnnnnnnnnnnnnnnnnnnnnnnnnnnnnnnnnnnnnnnnnnnnnnnnnnnnnnnnnnnnnnnnnnnnnnnnnnnnnnnnnnnnnnnnnnnnnnnnnnnnnnnnnnnnnnnnnnnnnnnnnnnnnnnnnnnnnnnnnnnnnnnnnnnnnnnnnnnnnnnnnnnnnnnnnnnnnnnnnnnnnnnnnnnnnnnnnnnnnnnnnnnnnnnnnnnnnnnnnnnnnnnnnnnnnnnnnnnnnnnnnnnnnnnnnnnnnnnnnnnnnnnnnnnnnnnnnnnnnnnnnnnnnnnnnnnnnnnnnnnnnnnnnnnnnnnnnnnnnnnnnnnnnnnnnnnnnnnnnnnnnnnnnnnnnnnnnnnnnnnnnnnnnnnnnnnnnnnnnnnnnnnnnnnnnnnnnnnnnnnnnnnnnnnnnnnnnnnnnnnnnnnnnnnnnnnnnnnnnnnnnnnnnnnnnnnnnnnnnnnnnnnnnnnnnnnnnnnnnnnnnnnnnnnnnnnnnnnnnnnnnnnnnnnnnnnnnnnnnnnnnnnnnnnnnnnnnnnnnnnnnnnnnnnnnnnnnnnnnnnnnnnnnnnnnnnnnnnnnnnnnnnnnnnnnnnnnnnnnnnnnnnnnnnnnnnnnnnnnnnnnnnnnnnnnnnnnnnnnnnnnnnnnnnnnnnnnnnnnnnnnnnnnnnnnnnnnnnnnnnnnnnnnnnnnnnnnnnnnnnnnnnnnnnnnnnnnnnnnnnnnnnnnnnnnnnnnnnnnnnnnnnnnnnnnnnnnnnnnnnnnnnnnnnnnnnnnnnnnnnnnnnnnnnnnnnnnnnnnnnnnnnnnnnnnnnnnnnnnnnnnnnnnnnnnnnnnnnnnnnnnnnnnnnnnnnnnnnnnnnnnnnnnnnnnnnnnnnnnnnnnnnnnnnnnnnnnnnnnnnnnnnnnnnnnnnnnnnnnnnnnnnnnnnnnnnnnnnnnnnnnnnnnnnnnnnnnnnnnnnnnnnnnnnnnnnnnnnnnnnnnnnnnnnnnnnnnnnnnnnnnnnnnnnnnnnnnnnnnnnnnnnnnnnnnnnnnnnnnnnnnnnnnnnnnnnnnnnnnnnnnnnnnnnnnnnnnnnnnnnnnnnnnnnnnnnnnnnnnnnnnnnnnnnnnnnnnnnnnnnnnnnnnnnnnnnnnnnnnnnnnnnnnnnnnnnnnnnnnnnnnnnnnnnnnnnnnnnnnnnnnnnnnnnnnnnnnnnnnnnnnnnnnnnnnnnnnnnnnnnnnnnnnnnnnnnnnnnnnnnnnnnnnnnnnnnnnnnnnnnnnnnnnnnnnnnnnnnnnnnnnnnnnnnnnnnnnnnnnnnnnnnnnnnnnnnnnnnnnnnnnnnnnnnnnnnnnnnnnnnnnnnnnnnnnnnnnnnnnnnnnnnnnnnnnnnnnnnnnnnnnnnnnnnnnnnnnnnnnnnnnnnnnnnnnnnnnnnnnnnnnnnnnnnnnnnnnnnnnnnnnnnnnnnnnnnnnnnnnnnnnnnnnnnnnnnnnnnnnnnnnnnnnnnnnnnnnnnnnnnnnnnnnnnnnnnnnnnnnnnnnnnnnnnnnnnnnnnnnnnnnnnnnnnnnnnnnnnnnnnnnnnnnnnnnnnnnnnnnnnnnnnnnnnnnnnnnnnnnnnnnnnnnnnnnnnnnnnnnnnnnnnnnnnnnnnnnnnnnnnnnnnnnnnnnnnnnnnnnnnnnnnnnnnnnnnnnnnnnnnnnnnnnnnnnnnnnnnnnnnnnnnnnnnnnnnnnnnnnnnnnnnnnnnnnnnnnnnnnnnnnnnnnnnnnnnnnnnnnnnnnnnnnnnnnnnnnnnnnnnnnnnnnnnnnnnnnnnnnnnnnnnnnnnnnnnnnnnnnnnnnnnnnnnnnnnnnnnnnnnnnnnnnnnnnnnnnnnnnnnnnnnnnnnnnnnnnnnnnnnnnnnnnnnnnnnnnnnnnnnnnnnnnnnnnnnnnnnnnnnnnnnnnnnnnnnnnnnnnnnnnnnnnnnnnnnnnnnnnnnnnnnnnnnnnnnnnnnnnnnnnnnnnnnnnnnnnnnnnnnnnnnnnnnnnnnnnnnnnnnnnnnnnnnnnnnnnnnnnnnnnnnnnnnnnnnnnnnnnnnnnnnnnnnnnnnnnnnnnnnnnnnnnnnnnnnnnnnnnnnnnnnnnnnnnnnnnnnnnnnnnnnnnnnnnnnnnnnnnnnnnnnnnnnnnnnnnnnnnnnnnnnnnnnnnnnnnnnnnnnnnnnnnnnnnnnnnnnnnnnnnnnnnnnnnnnnnnnnnnnnnnnnnnnnnnnnnnnnnnnnnnnnnnnnnnnnnnnnnnnnnnnnnnnnnnnnnnnnnnnnnnnnnnnnnnnnnnnnnnnnnnnnnnnnnnnnnnnnnnnnnnnnnnnnnnnnnnnnnnnnnnnnnnnnnnnnnnnnnnnnnnnnnnnnnnnnnnnnnnnnnnnnnnnnnnnnnnnnnnnnnnnnnnnnnnnnnnnnnnnnnnnnnnnnnnnnnnnnnnnnnnnnnnnnnnnnnnnnnnnnnnnnnnnnnnnnnnnnnnnnnnnnnnnnnnnnnnnnnnnnnnnnnnnnnnnnnnnnnnnnnnnnnnnnnnnnnnnnnnnnnnnnnnnnnnnnnnnnnnnnnnnnnnnnnnnnnnnnnnnnnnnnnnnnnnnnnnnnnnnnnnnnnnnnnnnnnnnnnnnnnnnnnnnnnnnnnnnnnnnnnnnnnnnnnnnnnnnnnnnnnnnnnnnnnnnnnnnnnnnnnnnnnnnnnnnnnnnnnnnnnnnnnnnnnnnnnnnnnnnnnnnnnnnnnnnnnnnnnnnnnnnnnnnnnnnnnnnnnnnnnnnnnnnnnnnnnnnnnnnnnnnnnnnnnnnnnnnnnnnnnnnnnnnnnnnnnnnnnnnnnnnnnnnnnnnnnnnnnnnnnnnnnnnnnnnnnnnnnnnnnnnnnnnnnnnnnnnnnnnnnnnnnnnnnnnnnnnnnnnnnnnnnnnnnnnnnnnnnnnnnnnnnnnnnnnnnnnnnnnnnnnnnnnnnnnnnnnnnnnnnnnnnnnnnnnnnnnnnnnnnnnnnnnnnnnnnnnnnnnnnnnnnnnnnnnnnnnnnnnnnnnnnnnnnnnnnnnnnnnnnnnnnnnnnnnnnnnnnnnnnnnnnnnnnnnnnnnnnnnnnnnnnnnnnnnnnnnnnnnnnnnnnnnnnnnnnnnnnnnnnnnnnnnnnnnnnnnnnnnnnnnnnnnnnnnnnnnnnnnnnnnnnnnnnnnnnnnnnnnnnnnnnnnnnnnnnnnnnnnnnnnnnnnnnnnnnnnnnnnnnnnnnnnnnnnnnnnnnnnnnnnnnnnnnnnnnnnnnnnnnnnnnnnnnnnnnnnnnnnnnnnnnnnnnnnnnnnnnnnnnnnnnnnnnnnnnnnnnnnnnnnnnnnnnnnnnnnnnnnnnnnnnnnnnnnnnnnnnnnnnnnnnnnnnnnnnnnnnnnnnnnnnnnnnnnnnnnnnnnnnnnnnnnnnnnnnnnnnnnnnnnnnnnnnnnnnnnnnnnnnnnnnnnnnnnnnnnnnnnnnnnnnnnnnnnnnnnnnnnnnnnnnnnnnnnnnnnnnnnnnnnnnnnnnnnnnnnnnnnnnnnnnnnnnnnnnnnnnnnnnnnnnnnnnnnnnnnnnnnnnnnnnnnnnnnnnnnnnnnnnnnnnnnnnnnnnnnnnnnnnnnnnnnnnnnnnnnnnnnnnnnnnnnnnnnnnnnnnnnnnnnnnnnnnnnnnnnnnnnnnnnnnnnnnnnnnnnnnnnnnnnnnnnnnnnnnnnnnnnnnnnnnnnnnnnnnnnnnnnnnnnnnnnnnnnnnnnnnnnnnnnnnnnnnnnnnnnnnnnnnnnnnnnnnnnnnnnnnnnnnnnnnnnnnnnnnnnnnnnnnnnnnnnnnnnnnnnnnnnnnnnnnnnnnnnnnnnnnnnnnnnnnnnnnnnnnnnnnnnnnnnnnnnnnnnnnnnnnnnnnnnnnnnnnnnnnnnnnnnnnnnnnnnnnnnnnnnnnnnnnnnnnnnnnnnnnnnnnnnnnnnnnnnnnnnnnnnnnnnnnnnnnnnnnnnnnnnnnnnnnnnnnnnnnnnnnnnnnnnnnnnnnnnnnnnnnnnnnnnnnnnnnnnnnnnnnnnnnnnnnnnnnnnnnnnnnnnnnnnnnnnnnnnnnnnnnnnnnnnnnnnnnnnnnnnnnnnnnnnnnnnnnnnnnnnnnnnnnnnnnnnnnnnnnnnnnnnnnnnnnnnnnnnnnnnnnnnnnnnnnnnnnnnnnnnnnnnnnnnnnnnnnnnnnnnnnnnnnnnnnnnnnnnnnnnnnnnnnnnnnnnnnnnnnnnnnnnnnnnnnnnnnnnnnnnnnnnnnnnnnnnnnnnnnnnnnnnnnnnnnnnnnnnnnnnnnnnnnnnnnnnnnnnnnnnnnnnnnnnnnnnnnnnnnnnnnnnnnnnnnnnnnnnnnnnnnnnnnnnnnnnnnnnnnnnnnnnnnnnnnnnnnnnnnnnnnnnnnnnnnnnnnnnnnnnnnnnnnnnnnnnnnnnnnnnnnnnnnnnnnnnnnnnnnnnnnnnnnnnnnnnnnnnnnnnnnnnnnnnnnnnnnnnnnnnnnnnnnnnnnnnnnnnnnnnnnnnnnnnnnnnnnnnnnnnnnnnnnnnnnnnnnnnnnnnnnnnnnnnnnnnnnnnnnnnnnnnnnnnnnnnnnnnnnnnnnnnnnnnnnnnnnnnnnnnnnnnnnnnnnnnnnnnnnnnnnnnnnnnnnnnnnnnnnnnnnnnnnnnnnnnnnnnnnnnnnnnnnnnnnnnnnnnnnnnnnnnnnnnnnnnnnnnnnnnnnnnnnnnnnnnnnnnnnnnnnnnnnnnnnnnnnnnnnnnnnnnnnnnnnnnnnnnnnnnnnnnnnnnnnnnnnnnnnnnnnnnnnnnnnnnnnnnnnnnnnnnnnnnnnnnnnnnnnnnnnnnnnnnnnnnnnnnnnnnnnnnnnnnnnnnnnnnnnnnnnnnnnnnnnnnnnnnnnnnnnnnnnnnnnnnnnnnnnnnnnnnnnnnnnnnnnnnnnnnnnnnnnnnnnnnnnnnnnnnnnnnnnnnnnnnnnnnnnnnnnnnnnnnnnnnnnnnnnnnnnnnnnnnnnnnnnnnnnnnnnnnnnnnnnnnnnnnnnnnnnnnnnnnnnnnnnnnnnnnnnnnnnnnnnnnnnnnnnnnnnnnnnnnnnnnnnnnnnnnnnnnnnnnnnnnnnnnnnnnnnnnnnnnnnnnnnnnnnnnnnnnnnnnnnnnnnnnnnnnnnnnnnnnnnnnnnnnnnnnnnnnnnnnnnnnnnnnnnnnnnnnnnnnnnnnnnnnnnnnnnnnnnnnnnnnnnnnnnnnnnnnnnnnnnnnnnnnnnnnnnnnnnnnnnnnnnnnnnnnnnnnnnnnnnnnnnnnnnnnnnnnnnnnnnnnnnnnnnnnnnnnnnnnnnnnnnnnnnnnnnnnnnnnnnnnnnnnnnnnnnnnnnnnnnnnnnnnnnnnnnnnnnnnnnnnnnnnnnnnnnnnnnnnnnnnnnnnnnnnnnnnnnnnnnnnnnnnnnnnnnnnnnnnnnnnnnnnnnnnnnnnnnnnnnnnnnnnnnnnnnnnnnnnnnnnnnnnnnnnnnnnnnnnnnnnnnnnnnnnnnnnnnnnnnnnnnnnnnnnnnnnnnnnnnnnnnnnnnnnnnnnnnnnnnnnnnnnnnnnnnnnnnnnnnnnnnnnnnnnnnnnnnnnnnnnnnnnnnnnnnnnnnnnnnnnnnnnnnnnnnnnnnnnnnnnnnnnnnnnnnnnnnnnnnnnnnnnnnnnnnnnnnnnnnnnnnnnnnnnnnnnnnnnnnnnnnnnnnnnnnnnnnnnnnnnnnnnnnnnnnnnnnnnnnnnnnnnnnnnnnnnnnnnnnnnnnnnnnnnnnnnnnnnnnnnnnnnnnnnnnnnnnnnnnnnnnnnnnnnnnnnnnnnnnnnnnnnnnnnnnnnnnnnnnnnnnnnnnnnnnnnnnnnnnnnnnnnnnnnnnnnnnnnnnnnnnnnnnnnnnnnnnnnnnnnnnnnnnnnnnnnnnnnnnnnnnnnnnnnnnnnnnnnnnnnnnnnnnnnnnnnnnnnnnnnnnnnnnnnnnnnnnnnnnnnnnnnnnnnnnnnnnnnnnnnnnnnnnnnnnnnnnnnnnnnnnnnnnnnnnnnnnnnnnnnnnnnnnnnnnnnnnnnnnnnnnnnnnnnnnnnnnnnnnnnnnnnnnnnnnnnnnnnnnnnnnnnnnnnnnnnnnnnnnnnnnnnnnnnnnnnnnnnnnnnnnnnnnnnnnnnnnnnnnnnnnnnnnnnnnnnnnnnnnnnnnnnnnnnnnnnnnnnnnnnnnnnnnnnnnnnnnnnnnnnnnnnnnnnnnnnnnnnnnnnnnnnnnnnnnnnnnnnnnnnnnnnnnnnnnnnnnnnnnnnnnnnnnnnnnnnnnnnnnnnnnnnnnnnnnnnnnnnnnnnnnnnnnnnnnnnnnnnnnnnnnnnnnnnnnnnnnnnnnnnnnnnnnnnnnnnnnnnnnnnnnnnnnnnnnnnnnnnnnnnnnnnnnnnnnnnnnnnnnnnnnnnnnnnnnnnnnnnnnnnnnnnnnnnnnnnnnnnnnnnnnnnnnnnnnnnnnnnnnnnnnnnnnnnnnnnnnnnnnnnnnnnnnnnnnnnnnnnnnnnnnnnnnnnnnnnnnnnnnnnnnnnnnnnnnnnnnnnnnnnnnnnnnnnnnnnnnnnnnnnnnnnnnnnnnnnnnnnnnnnnnnnnnnnnnnnnnnnnnnnnnnnnnnnnnnnnnnnnnnnnnnnnnnnnnnnnnnnnnnnnnnnnnnnnnnnnnnnnnnnnnnnnnnnnnnnnnnnnnnnnnnnnnnnnnnnnnnnnnnnnnnnnnnnnnnnnnnnnnnnnnnnnnnnnnnnnnnnnnnnnnnnnnnnnnnnnnnnnnnnnnnnnnnnnnnnnnnnnnnnnnnnnnnnnnnnnnnnnnnnnnnnnnnnnnnnnnnnnnnnnnnnnnnnnnnnnnnnnnnnnnnnnnnnnnnnnnnnnnnnnnnnnnnnnnnnnnnnnnnnnnnnnnnnnnnnnnnnnnnnnnnnnnnnnnnnnnnnnnnnnnnnnnnnnnnnnnnnnnnnnnnnnnnnnnnnnnnnnnnnnnnnnnnnnnnnnnnnnnnnnnnnnnnnnnnnnnnnnnnnnnnnnnnnnnnnnnnnnnnnnnnnnnnnnnnnnnnnnnnnnnnnnnnnnnnnnnnnnnnnnnnnnnnnnnnnnnnnnnnnnnnnnnnnnnnnnnnnnnnnnnnnnnnnnnnnnnnnnnnnnnnnnnnnnnnnnnnnnnnnnnnnnnnnnnnnnnnnnnnnnnnnnnnnnnnnnnnnnnnnnnnnnnnnnnnnnnnnnnnnnnnnnnnnnnnnnnnnnnnnnnnnnnnnnnnnnnnnnnnnnnnnnnnnnnnnnnnnnnnnnnnnnnnnnnnnnnnnnnnnnnnnnnnnnnnnnnnnnnnnnnnnnnnnnnnnnnnnnnnnnnnnnnnnnnnnnnnnnnnnnnnnnnnnnnnnnnnnnnnnnnnnnnnnnnnnnnnnnnnnnnnnnnnnnnnnnnnnnnnnnnnnnnnnnnnnnnnnnnnnnnnnnnnnnnnnnnnnnnnnnnnnnnnnnnnnnnnnnnnnnnnnnnnnnnnnnnnnnnnnnnnnnnnnnnnnnnnnnnnnnnnnnnnnnnnnnnnnnnnnnnnnnnnnnnnnnnnnnnnnnnnnnnnnnnnnnnnnnnnnnnnnnnnnnnnnnnnnnnnnnnnnnnnnnnnnnnnnnnnnnnnnnnnnnnnnnnnnnnnnnnnnnnnnnnnnnnnnnnnnnnnnnnnnnnnnnnnnnnnnnnnnnnnnnnnnnnnnnnnnnnnnnnnnnnnnnnnnnnnnnnnnnnnnnnnnnnnnnnnnnnnnnnnnnnnnnnnnnnnnnnnnnnnnnnnnnnnnnnnnnnnnnnnnnnnnnnnnnnnnnnnnnnnnnnnnnnnnnnnnnnnnnnnnnnnnnnnnnnnnnnnnnnnnnnnnnnnnnnnnnnnnnnnnnnnnnnnnnnnnnnnnnnnnnnnnnnnnnnnnnnnnnnnnnnnnnnnnnnnnnnnnnnnnnnnnnnnnnnnnnnnnnnnnnnnnnnnnnnnnnnnnnnnnnnnnnnnnnnnnnnnnnnnnnnnnnnnnnnnnnnnnnnnnnnnnnnnnnnnnnnnnnnnnnnnnnnnnnnnnnnnnnnnnnnnnnnnnnnnnnnnnnnnnnnnnnnnnnnnnnnnnnnnnnnnnnnnnnnnnnnnnnnnnnnnnnnnnnnnnnnnnnnnnnnnnnnnnnnnnnnnnnnnnnnnnnnnnnnnnnnnnnnnnnnnnnnnnnnnnnnnnnnnnnnnnnnnnnnnnnnnnnnnnnnnnnnnnnnnnnnnnnnnnnnnnnnnnnnnnnnnnnnnnnnnnnnnnnnnnnnnnnnnnnnnnnnnnnnnnnnnnnnnnnnnnnnnnnnnnnnnnnnnnnnnnnnnnnnnnnnnnnnnnnnnnnnnnnnnnnnnnnnnnnnnnnnnnnnnnnnnnnnnnnnnnnnnnnnnnnnnnnnnnnnnnnnnnnnnnnnnnnnnnnnnnnnnnnnnnnnnnnnnnnnnnnnnnnnnnnnnnnnnnnnnnnnnnnnnnnnnnnnnnnnnnnnnnnnnnnnnnnnnnnnnnnnnnnnnnnnnnnnnnnnnnnnnnnnnnnnnnnnnnnnnnnnnnnnnnnnnnnnnnnnnnnnnnnnnnnnnnnnnnnnnnnnnnnnnnnnnnnnnnnnnnnnnnnnnnnnnnnnnnnnnnnnnnnnnnnnnnnnnnnnnnnnnnnnnnnnnnnnnnnnnnnnnnnnnnnnnnnnnnnnnnnnnnnnnnnnnnnnnnnnnnnnnnnnnnnnnnnnnnnnnnnnnnnnnnnnnnnnnnnnnnnnnnnnnnnnnnnnnnnnnnnnnnnnnnnnnnnnnnnnnnnnnnnnnnnnnnnnnnnnnnnnnnnnnnnnnnnnnnnnnnnnnnnnnnnnnnnnnnnnnnnnnnnnnnnnnnnnnnnnnnnnnnnnnnnnnnnnnnnnnnnnnnnnnnnnnnnnnnnnnnnnnnnnnnnnnnnnnnnnnnnnnnnnnnnnnnnnnnnnnnnnnnnnnnnnnnnnnnnnnnnnnnnnnnnnnnnnnnnnnnnnnnnnnnnnnnnnnnnnnnnnnnnnnnnnnnnnnnnnnnnnnnnnnnnnnnnnnnnnnnnnnnnnnnnnnnnnnnnnnnnnnnnnnnnnnnnnnnnnnnnnnnnnnnnnnnnnnnnnnnnnnnnnnnnnnnnnnnnnnnnnnnnnnnnnnnnnnnnnnnnnnnnnnnnnnnnnnnnnnnnnnnnnnnnnnnnnnnnnnnnnnnnnnnnnnnnnnnnnnnnnnnnnnnnnnnnnnnnnnnnnnnnnnnnnnnnnnnnnnnnnnnnnnnnnnnnnnnnnnnnnnnnnnnnnnnnnnnnnnnnnnnnnnnnnnnnnnnnnnnnnnnnnnnnnnnnnnnnnnnnnnnnnnnnnnnnnnnnnnnnnnnnnnnnnnnnnnnnnnnnnnnnnnnnnnnnnnnnnnnnnnnnnnnnnnnnnnnnnnnnnnnnnnnnnnnnnnnnnnnnnnnnnnnnnnnnnnnnnnnnnnnnnnnnnnnnnnnnnnnnnnnnnnnnnnnnnnnnnnnnnnnnnnnnnnnnnnnnnnnnnnnnnnnnnnnnnnnnnnnnnnnnnnnnnnnnnnnnnnnnnnnnnnnnnnnnnnnnnnnnnnnnnnnnnnnnnnnnnnnnnnnnnnnnnnnnnnnnnnnnnnnnnnnnnnnnnnnnnnnnnnnnnnnnnnnnnnnnnnnnnnnnnnnnnnnnnnnnnnnnnnnnnnnnnnnnnnnnnnnnnnnnnnnnnnnnnnnnnnnnnnnnnnnnnnnnnnnnnnnnnnnnnnnnnnnnnnnnnnnnnnnnnnnnnnnnnnnnnnnnnnnnnnnnnnnnnnnnnnnnnnnnnnnnnnnnnnnnnnnnnnnnnnnnnnnnnnnnnnnnnnnnnnnnnnnnnnnnnnnnnnnnnnnnnnnnnnnnnnnnnnnnnnnnnnnnnnnnnnnnnnnnnnnnnnnnnnnnnnnnnnnnnnnnnnnnnnnnnnnnnnnnnnnnnnnnnnnnnnnnnnnnnnnnnnnnnnnnnnnnnnnnnnnnnnnnnnnnnnnnnnnnnnnnnnnnnnnnnnnnnnnnnnnnnnnnnnnnnnnnnnnnnnnnnnnnnnnnnnnnnnnnnnnnnnnnnnnnnnnnnnnnnnnnnnnnnnnnnnnnnnnnnnnnnnnnnnnnnnnnnnnnnnnnnnnnnnnnnnnnnnnnnnnnnnnnnnnnnnnnnnnnnnnnnnnnnnnnnnnnnnnnnnnnnnnnnnnnnnnnnnnnnnnnnnnnnnnnnnnnnnnnnnnnnnnnnnnnnnnnnnnnnnnnnnnnnnnnnnnnnnnnnnnnnnnnnnnnnnnnnnnnnnnnnnnnnnnnnnnnnnnnnnnnnnnnnnnnnnnnnnnnnnnnnnnnnnnnnnnnnnnnnnnnnnnnnnnnnnnnnnnnnnnnnnnnnnnnnnnnnnnnnnnnnnnnnnnnnnnnnnnnnnnnnnnnnnnnnnnnnnnnnnnnnnnnnnnnnnnnnnnnnnnnnnnnnnnnnnnnnnnnnnnnnnnnnnnnnnnnnnnnnnnnnnnnnnnnnnnnnnnnnnnnnnnnnnnnnnnnnnnnnnnnnnnnnnnnnnnnnnnnnnnnnnnnnnnnnnnnnnnnnnnnnnnnnnnnnnnnnnnnnnnnnnnnnnnnnnnnnnnnnnnnnnnnnnnnnnnnnnnnnnnnnnnnnnnnnnnnnnnnnnnnnnnnnnnnnnnnnnnnnnnnnnnnnnnnnnnnnnnnnnnnnnnnnnnnnnnnnnnnnnnnnnnnnnnnnnnnnnnnnnnnnnnnnnnnnnnnnnnnnnnnnnnnnnnnnnnnnnnnnnnnnnnnnnnnnnnnnnnnnnnnnnnnnnnnnnnnnnnnnnnnnnnnnnnnnnnnnnnnnnnnnnnnnnnnnnnnnnnnnnnnnnnnnnnnnnnnnnnnnnnnnnnnnnnnnnnnnnnnnnnnnnnnnnnnnnnnnnnnnnnnnnnnnnnnnnnnnnnnnnnnnnnnnnnnnnnnnnnnnnnnnnnnnnnnnnnnnnnnnnnnnnnnnnnnnnnnnnnnnnnnnnnnnnnnnnnnnnnnnnnnnnnnnnnnnnnnnnnnnnnnnnnnnnnnnnnnnnnnnnnnnnnnnnnnnnnnnnnnnnnnnnnnnnnnnnnnnnnnnnnnnnnnnnnnnnnnnnnnnnnnnnnnnnnnnnnnnnnnnnnnnnnnnnnnnnnnnnnnnnnnnnnnnnnnnnnnnnnnnnnnnnnnnnnnnnnnnnnnnnnnnnnnnnnnnnnnnnnnnnnnnnnnnnnnnnnnnnnnnnnnnnnnnnnnnnnnnnnnnnnnnnnnnnnnnnnnnnnnnnnnnnnnnnnnnnnnnnnnnnnnnnnnnnnnnnnnnnnnnnnnnnnnnnnnnnnnnnnnnnnnnnnnnnnnnnnnnnnnnnnnnnnnnnnnnnnnnnnnnnnnnnnnnnnnnnnnnnnnnnnnnnnnnnnnnnnnnnnnnnnnnnnnnnnnnnnnnnnnnnnnnnnnnnnnnnnnnnnnnnnnnnnnnnnnnnnnnnnnnnnnnnnnnnnnnnnnnnnnnnnnnnnnnnnnnnnnnnnnnnnnnnnnnnnnnnnnnnnnnnnnnnnnnnnnnnnnnnnnnnnnnnnnnnnnnnnnnnnnnnnnnnnnnnnnnnnnnnnnnnnnnnnnnnnnnnnnnnnnnnnnnnnnnnnnnnnnnnnnnnnnnnnnnnnnnnnnnnnnnnnnnnnnnnnnnnnnnnnnnnnnnnnnnnnnnnnnnnnnnnnnnnnnnnnnnnnnnnnnnnnnnnnnnnnnnnnnnnnnnnnnnnnnnnnnnnnnnnnnnnnnnnnnnnnnnnnnnnnnnnnnnnnnnnnnnnnnnnnnnnnnnnnnnnnnnnnnnnnnnnnnnnnnnnnnnnnnnnnnnnnnnnnnnnnnnnnnnnnnnnnnnnnnnnnnnnnnnnnnnnnnnnnnnnnnnnnnnnnnnnnnnnnnnnnnnnnnnnnnnnnnnnnnnnnnnnnnnnnnnnnnnnnnnnnnnnnnnnnnnnnnnnnnnnnnnnnnnnnnnnnnnnnnnnnnnnnnnnnnnnnnnnnnnnnnnnnnnnnnnnnnnnnnnnnnnnnnnnnnnnnnnnnnnnnnnnnnnnnnnnnnnnnnnnnnnnnnnnnnnnnnnnnnnnnnnnnnnnnnnnnnnnnnnnnnnnnnnnnnnnnnnnnnnnnnnnnnnnnnnnnnnnnnnnnnnnnnnnnnnnnnnnnnnnnnnnnnnnnnnnnnnnnnnnnnnnnnnnnnnnnnnnnnnnnnnnnnnnnnnnnnnnnnnnnnnnnnnnnnnnnnnnnnnnnnnnnnnnnnnnnnnnnnnnnnnnnnnnnnnnnnnnnnnnnnnnnnnnnnnnnnnnnnnnnnnnnnnnnnnnnnnnnnnnnnnnnnnnnnnnnnnnnnnnnnnnnnnnnnnnnnnnnnnnnnnnnnnnnnnnnnnnnnnnnnnnnnnnnnnnnnnnnnnnnnnnnnnnnnnnnnnnnnnnnnnnnnnnnnnnnnnnnnnnnnnnnnnnnnnnnnnnnnnnnnnnnnnnnnnnnnnnnnnnnnnnnnnnnnnnnnnnnnnnnnnnnnnnnnnnnnnnnnnnnnnnnnnnnnnnnnnnnnnnnnnnnnnnnnnnnnnnnnnnnnnnnnnnnnnnnnnnnnnnnnnnnnnnnnnnnnnnnnnnnnnnnnnnnnnnnnnnnnnnnnnnnnnnnnnnnnnnnnnnnnnnnnnnnnnnnnnnnnnnnnnnnnnnnnnnnnnnnnnnnnnnnnnnnnnnnnnnnnnnnnnnnnnnnnnnnnnnnnnnnnnnnnnnnnnnnnnnnnnnnnnnnnnnnnnnnnnnnnnnnnnnnnnnnnnnnnnnnnnnnnnnnnnnnnnnnnnnnnnnnnnnnnnnnnnnnnnnnnnnnnnnnnnnnnnnnnnnnnnnnnnnnnnnnnnnnnnnnnnnnnnnnnnnnnnnnnnnnnnnnnnnnnnnnnnnnnnnnnnnnnnnnnnnnnnnnnnnnnnnnnnnnnnnnnnnnnnnnnnnnnnnnnnnnnnnnnnnnnnnnnnnnnnnnnnnnnnnnnnnnnnnnnnnnnnnnnnnnnnnnnnnnnnnnnnnnnnnnnnnnnnnnnnnnnnnnnnnnnnnnnnnnnnnnnnnnnnnnnnnnnnnnnnnnnnnnnnnnnnnnnnnnnnnnnnnnnnnnnnnnnnnnnnnnnnnnnnnnnnnnnnnnnnnnnnnnnnnnnnnnnnnnnnnnnnnnnnnnnnnnnnnnnnnnnnnnnnnnnnnnnnnnnnnnnnnnnnnnnnnnnnnnnnnnnnnnnnnnnnnnnnnnnnnnnnnnnnnnnnnnnnnnnnnnnnnnnnnnnnnnnnnnnnnnnnnnnnnnnnnnnnnnnnnnnnnnnnnnnnnnnnnnnnnnnnnnnnnnnnnnnnnnnnnnnnnnnnnnnnnnnnnnnnnnnnnnnnnnnnnnnnnnnnnnnnnnnnnnnnnnnnnnnnnnnnnnnnnnnnnnnnnnnnnnnnnnnnnnnnnnnnnnnnnnnnnnnnnnnnnnnnnnnnnnnnnnnnnnnnnnnnnnnnnnnnnnnnnnnnnnnnnnnnnnnnnnnnnnnnnnnnnnnnnnnnnnnnnnnnnnnnnnnnnnnnnnnnnnnnnnnnnnnnnnnnnnnnnnnnnnnnnnnnnnnnnnnnnnnnnnnnnnnnnnnnnnnnnnnnnnnnnnnnnnnnnnnnnnnnnnnnnnnnnnnnnnnnnnnnnnnnnnnnnnnnnnnnnnnnnnnnnnnnnnnnnnnnnnnnnnnnnnnnnnnnnnnnnnnnnnnnnnnnnnnnnnnnnnnnnnnnnnnnnnnnnnnnnnnnnnnnnnnnnnnnnnnnnnnnnnnnnnnnnnnnnnnnnnnnnnnnnnnnnnnnnnnnnnnnnnnnnnnnnnnnnnnnnnnnnnnnnnnnnnnnnnnnnnnnnnnnnnnnnnnnnnnnnnnnnnnnnnnnnnnnnnnnnnnnnnnnnnnnnnnnnnnnnnnnnnnnnnnnnnnnnnnnnnnnnnnnnnnnnnnnnnnnnnnnnnnnnnnnnnnnnnnnnnnnnnnnnnnnnnnnnnnnnnnnnnnnnnnnnnnnnnnnnnnnnnnnnnnnnnnnnnnnnnnnnnnnnnnnnnnnnnnnnnnnnnnnnnnnnnnnnnnnnnnnnnnnnnnnnnnnnnnnnnnnnnnnnnnnnnnnnnnnnnnnnnnnnnnnnnnnnnnnnnnnnnnnnnnnnnnnnnnnnnnnnnnnnnnnnnnnnnnnnnnnnnnnnnnnnnnnnnnnnnnnnnnnnnnnnnnnnnnnnnnnnnnnnnnnnnnnnnnnnnnnnnnnnnnnnnnnnnnnnnnnnnnnnnnnnnnnnnnnnnnnnnnnnnnnnnnnnnnnnnnnnnnnnnnnnnnnnnnnnnnnnnnnnnnnnnnnnnnnnnnnnnnnnnnnnnnnnnnnnnnnnnnnnnnnnnnnnnnnnnnnnnnnnnnnnnnnnnnnnnnnnnnnnnnnnnnnnnnnnnnnnnnnnnnnnnnnnnnnnnnnnnnnnnnnnnnnnnnnnnnnnnnnnnnnnnnnnnnnnnnnnnnnnnnnnnnnnnnnnnnnnnnnnnnnnnnnnnnnnnnnnnnnnnnnnnnnnnnnnnnnnnnnnnnnnnnnnnnnnnnnnnnnnnnnnnnnnnnnnnnnnnnnnnnnnnnnnnnnnnnnnnnnnnnnnnnnnnnnnnnnnnnnnnnnnnnnnnnnnnnnnnnnnnnnnnnnnnnnnnnnnnnnnnnnnnnnnnnnnnnnnnnnnnnnnnnnnnnnnnnnnnnnnnnnnnnnnnnnnnnnnnnnnnnnnnnnnnnnnnnnnnnnnnnnnnnnnnnnnnnnnnnnnnnnnnnnnnnnnnnnnnnnnnnnnnnnnnnnnnnnnnnnnnnnnnnnnnnnnnnnnnnnnnnnnnnnnnnnnnnnnnnnnnnnnnnnnnnnnnnnnnnnnnnnnnnnnnnnnnnnnnnnnnnnnnnnnnnnnnnnnnnnnnnnnnnnnnnnnnnnnnnnnnnnnnnnnnnnnnnnnnnnnnnnnnnnnnnnnnnnnnnnnnnnnnnnnnnnnnnnnnnnnnnnnnnnnnnnnnnnnnnnnnnnnnnnnnnnnnnnnnnnnnnnnnnnnnnnnnnnnnnnnnnnnnnnnnnnnnnnnnnnnnnnnnnnnnnnnnnnnnnnnnnnnnnnnnnnnnnnnnnnnnnnnnnnnnnnnnnnnnnnnnnnnnnnnnnnnnnnnnnnnnnnnnnnnnnnnnnnnnnnnnnnnnnnnnnnnnnnnnnnnnnnnnnnnnnnnnnnnnnnnnnnnnnnnnnnnnnnnnnnnnnnnnnnnnnnnnnnnnnnnnnnnnnnnnnnnnnnnnnnnnnnnnnnnnnnnnnnnnnnnnnnnnnnnnnnnnnnnnnnnnnnnnnnnnnnnnnnnnnnnnnnnnnnnnnnnnnnnnnnnnnnnnnnnnnnnnnnnnnnnnnnnnnnnnnnnnnnnnnnnnnnnnnnnnnnnnnnnnnnnnnnnnnnnnnnnnnnnnnnnnnnnnnnnnnnnnnnnnnnnnnnnnnnnnnnnnnnnnnnnnnnnnnnnnnnnnnnnnnnnnnnnnnnnnnnnnnnnnnnnnnnnnnnnnnnnnnnnnnnnnnnnnnnnnnnnnnnnnnnnnnnnnnnnnnnnnnnnnnnnnnnnnnnnnnnnnnnnnnnnnnnnnnnnnnnnnnnnnnnnnnnnnnnnnnnnnnnnnnnnnnnnnnnnnnnnnnnnnnnnnnnnnnnnnnnnnnnnnnnnnnnnnnnnnnnnnnnnnnnnnnnnnnnnnnnnnnnnnnnnnnnnnnnnnnnnnnnnnnnnnnnnnnnnnnnnnnnnnnnnnnnnnnnnnnnnnnnnnnnnnnnnnnnnnnnnnnnnnnnnnnnnnnnnnnnnnnnnnnnnnnnnnnnnnnnnnnnnnnnnnnnnnnnnnnnnnnnnnnnnnnnnnnnnnnnnnnnnnnnnnnnnnnnnnnnnnnnnnnnnnnnnnnnnnnnnnnnnnnnnnnnnnnnnnnnnnnnnnnnnnnnnnnnnnnnnnnnnnnnnnnnnnnnnnnnnnnnnnnnnnnnnnnnnnnnnnnnnnnnnnnnnnnnnnnnnnnnnnnnnnnnnnnnnnnnnnnnnnnnnnnnnnnnnnnnnnnnnnnnnnnnnnnnnnnnnnnnnnnnnnnnnnnnnnnnnnnnnnnnnnnnnnnnnnnnnnnnnnnnnnnnnnnnnnnnnnnnnnnnnnnnnnnnnnnnnnnnnnnnnnnnnnnnnnnnnnnnnnnnnnnnnnnnnnnnnnnnnnnnnnnnnnnnnnnnnnnnnnnnnnnnnnnnnnnnnnnnnnnnnnnnnnnnnnnnnnnnnnnnnnnnnnnnnnnnnnnnnnnnnnnnnnnnnnnnnnnnnnnnnnnnnnnnnnnnnnnnnnnnnnnnnnnnnnnnnnnnnnnnnnnnnnnnnnnnnnnnnnnnnnnnnnnnnnnnnnnnnnnnnnnnnnnnnnnnnnnnnnnnnnnnnnnnnnnnnnnnnnnnnnnnnnnnnnnnnnnnnnnnnnnnnnnnnnnnnnnnnnnnnnnnnnnnnnnnnnnnnnnnnnnnnnnnnnnnnnnnnnnnnnnnnnnnnnnnnnnnnnnnnnnnnnnnnnnnnnnnnnnnnnnnnnnnnnnnnnnnnnnnnnnnnnnnnnnnnnnnnnnnnnnnnnnnnnnnnnnnnnnnnnnnnnnnnnnnnnnnnnnnnnnnnnnnnnnnnnnnnnnnnnnnnnnnnnnnnnnnnnnnnnnnnnnnnnnnnnnnnnnnnnnnnnnnnnnnnnnnnnnnnnnnnnnnnnnnnnnnnnnnnnnnnnnnnnnnnnnnnnnnnnnnnnnnnnnnnnnnnnnnnnnnnnnnnnnnnnnnnnnnnnnnnnnnnnnnnnnnnnnnnnnnnnnnnnnnnnnnnnnnnnnnnnnnnnnnnnnnnnnnnnnnnnnnnnnnnnnnnnnnnnnnnnnnnnnnnnnnnnnnnnnnnnnnnnnnnnnnnnnnnnnnnnnnnnnnnnnnnnnnnnnnnnnnnnnnnnnnnnnnnnnnnnnnnnnnnnnnnnnnnnnnnnnnnnnnnnnnnnnnnnnnnnnnnnnnnnnnnnnnnnnnnnnnnnnnnnnnnnnnnnnnnnnnnnnnnnnnnnnnnnnnnnnnnnnnnnnnnnnnnnnnnnnnnnnnnnnnnnnnnnnnnnnnnnnnnnnnnnnnnnnnnnnnnnnnnnnnnnnnnnnnnnnnnnnnnnnnnnnnnnnnnnnnnnnnnnnnnnnnnnnnnnnnnnnnnnnnnnnnnnnnnnnnnnnnnnnnnnnnnnnnnnnnnnnnnnnnnnnnnnnnnnnnnnnnnnnnnnnnnnnnnnnnnnnnnnnnnnnnnnnnnnnnnnnnnnnnnnnnnnnnnnnnnnnnnnnnnnnnnnnnnnnnnnnnnnnnnnnnnnnnnnnnnnnnnnnnnnnnnnnnnnnnnnnnnnnnnnnnnnnnnnnnnnnnnnnnnnnnnnnnnnnnnnnnnnnnnnnnnnnnnnnnnnnnnnnnnnnnnnnnnnnnnnnnnnnnnnnnnnnnnnnnnnnnnnnnnnnnnnnnnnnnnnnnnnnnnnnnnnnnnnnnnnnnnnnnnnnnnnnnnnnnnnnnnnnnnnnnnnnnnnnnnnnnnnnnnnnnnnnnnnnnnnnnnnnnnnnnnnnnnnnnnnnnnnnnnnnnnnnnnnnnnnnnnnnnnnnnnnnnnnnnnnnnnnnnnnnnnnnnnnnnnnnnnnnnnnnnnnnnnnnnnnnnnnnnnnnnnnnnnnnnnnnnnnnnnnnnnnnnnnnnnnnnnnnnnnnnnnnnnnnnnnnnnnnnnnnnnnnnnnnnnnnnnnnnnnnnnnnnnnnnnnnnnnnnnnnnnnnnnnnnnnnnnnnnnnnnnnnnnnnnnnnnnnnnnnnnnnnnnnnnnnnnnnnnnnnnnnnnnnnnnnnnnnnnnnnnnnnnnnnnnnnnnnnnnnnnnnnnnnnnnnnnnnnnnnnnnnnnnnnnnnnnnnnnnnnnnnnnnnnnnnnnnnnnnnnnnnnnnnnnnnnnnnnnnnnnnnnnnnnnnnnnnnnnnnnnnnnnnnnnnnnnnnnnnnnnnnnnnnnnnnnnnnnnnnnnnnnnnnnnnnnnnnnnnnnnnnnnnnnnnnnnnnnnnnnnnnnnnnnnnnnnnnnnnnnnnnnnnnnnnnnnnnnnnnnnnnnnnnnnnnnnnnnnnnnnnnnnnnnnnnnnnnnnnnnnnnnnnnnnnnnnnnnnnnnnnnnnnnnnnnnnnnnnnnnnnnnnnnnnnnnnnnnnnnnnnnnnnnnnnnnnnnnnnnnnnnnnnnnnnnnnnnnnnnnnnnnnnnnnnnnnnnnnnnnnnnnnnnnnnnnnnnnnnnnnnnnnnnnnnnnnnnnnnnnnnnnnnnnnnnnnnnnnnnnnnnnnnnnnnnnnnnnnnnnnnnnnnnnnnnnnnnnnnnnnnnnnnnnnnnnnnnnnnnnnnnnnnnnnnnnnnnnnnnnnnnnnnnnnnnnnnnnnnnnnnnnnnnnnnnnnnnnnnnnnnnnnnnnnnnnnnnnnnnnnnnnnnnnnnnnnnnnnnnnnnnnnnnnnnnnnnnnnnnnnnnnnnnnnnnnnnnnnnnnnnnnnnnnnnnnnnnnnnnnnnnnnnnnnnnnnnnnnnnnnnnnnnnnnnnnnnnnnnnnnnnnnnnnnnnnnnnnnnnnnnnnnnnnnnnnnnnnnnnnnnnnnnnnnnnnnnnnnnnnnnnnnnnnnnnnnnnnnnnnnnnnnnnnnnnnnnnnnnnnnnnnnnnnnnnnnnnnnnnnnnnnnnnnnnnnnnnnnnnnnnnnnnnnnnnnnnnnnnnnnnnnnnnnnnnnnnnnnnnnnnnnnnnnnnnnnnnnnnnnnnnnnnnnnnnnnnnnnnnnnnnnnnnnnnnnnnnnnnnnnnnnnnnnnnnnnnnnnnnnnnnnnnnnnnnnnnnnnnnnnnnnnnnnnnnnnnnnnnnnnnnnnnnnnnnnnnnnnnnnnnnnnnnnnnnnnnnnnnnnnnnnnnnnnnnnnnnnnnnnnnnnnnnnnnnnnnnnnnnnnnnnnnnnnnnnnnnnnnnnnnnnnnnnnnnnnnnnnnnnnnnnnnnnnnnnnnnnnnnnnnnnnnnnnnnnnnnnnnnnnnnnnnnnnnnnnnnnnnnnnnnnnnnnnnnnnnnnnnnnnnnnnnnnnnnnnnnnnnnnnnnnnnnnnnnnnnnnnnnnnnnnnnnnnnnnnnnnnnnnnnnnnnnnnnnnnnnnnnnnnnnnnnnnnnnnnnnnnnnnnnnnnnnnnnnnnnnnnnnnnnnnnnnnnnnnnnnnnnnnnnnnnnnnnnnnnnnnnnnnnnnnnnnnnnnnnnnnnnnnnnnnnnnnnnnnnnnnnnnnnnnnnnnnnnnnnnnnnnnnnnnnnnnnnnnnnnnnnnnnnnnnnnnnnnnnnnnnnnnnnnnnnnnnnnnnnnnnnnnnnnnnnnnnnnnnnnnnnnnnnnnnnnnnnnnnnnnnnnnnnnnnnnnnnnnnnnnnnnnnnnnnnnnnnnnnnnnnnnnnnnnnnnnnnnnnnnnnnnnnnnnnnnnnnnnnnnnnnnnnnnnnnnnnnnnnnnnnnnnnnnnnnnnnnnnnnnnnnnnnnnnnnnnnnnnnnnnnnnnnnnnnnnnnnnnnnnnnnnnnnnnnnnnnnnnnnnnnnnnnnnnnnnnnnnnnnnnnnnnnnnnnnnnnnnnnnnnnnnnnnnnnnnnnnnnnnnnnnnnnnnnnnnnnnnnnnnnnnnnnnnnnnnnnnnnnnnnnnnnnnnnnnnnnnnnnnnnnnnnnnnnnnnnnnnnnnnnnnnnnnnnnnnnnnnnnnnnnnnnnnnnnnnnnnnnnnnnnnnnnnnnnnnnnnnnnnnnnnnnnnnnnnnnnnnnnnnnnnnnnnnnnnnnnnnnnnnnnnnnnnnnnnnnnnnnnnnnnnnnnnnnnnnnnnnnnnnnnnnnnnnnnnnnnnnnnnnnnnnnnnnnnnnnnnnnnnnnnnnnnnnnnnnnnnnnnnnnnnnnnnnnnnnnnnnnnnnnnnnnnnnnnnnnnnnnnnnnnnnnnnnnnnnnnnnnnnnnnnnnnnnnnnnnnnnnnnnnnnnnnnnnnnnnnnnnnnnnnnnnnnnnnnnnnnnnnnnnnnnnnnnnnnnnnnnnnnnnnnnnnnnnnnnnnnnnnnnnnnnnnnnnnnnnnnnnnnnnnnnnnnnnnnnnnnnnnnnnnnnnnnnnnnnnnnnnnnnnnnnnnnnnnnnnnnnnnnnnnnnnnnnnnnnnnnnnnnnnnnnnnnnnnnnnnnnnnnnnnnnnnnnnnnnnnnnnnnnnnnnnnnnnnnnnnnnnnnnnnnnnnnnnnnnnnnnnnnnnnnnnnnnnnnnnnnnnnnnnnnnnnnnnnnnnnnnnnnnnnnnnnnnnnnnnnnnnnnnnnnnnnnnnnnnnnnnnnnnnnnnnnnnnnnnnnnnnnnnnnnnnnnnnnnnnnnnnnnnnnnnnnnnnnnnnnnnnnnnnnnnnnnnnnnnnnnnnnnnnnnnnnnnnnnnnnnnnnnnnnnnnnnnnnnnnnnnnnnnnnnnnnnnnnnnnnnnnnnnnnnnnnnnnnnnnnnnnnnnnnnnnnnnnnnnnnnnnnnnnnnnnnnnnnnnnnnnnnnnnnnnnnnnnnnnnnnnnnnnnnnnnnnnnnnnnnnnnnnnnnnnnnnnnnnnnnnnnnnnnnnnnnnnnnnnnnnnnnnnnnnnnnnnnnnnnnnnnnnnnnnnnnnnnnnnnnnnnnnnnnnnnnnnnnnnnnnnnnnnnnnnnnnnnnnnnnnnnnnnnnnnnnnnnnnnnnnnnnnnnnnnnnnnnnnnnnnnnnnnnnnnnnnnnnnnnnnnnnnnnnnnnnnnnnnnnnnnnnnnnnnnnnnnnnnnnnnnnnnnnnnnnnnnnnnnnnnnnnnnnnnnnnnnnnnnnnnnnnnnnnnnnnnnnnnnnnnnnnnnnnnnnnnnnnnnnnnnnnnnnnnnnnnnnnnnnnnnnnnnnnnnnnnnnnnnnnnnnnnnnnnnnnnnnnnnnnnnnnnnnnnnnnnnnnnnnnnnnnnnnnnnnnnnnnnnnnnnnnnnnnnnnnnnnnnnnnnnnnnnnnnnnnnnnnnnnnnnnnnnnnnnnnnnnnnnnnnnnnnnnnnnnnnnnnnnnnnnnnnnnnnnnnnnnnnnnnnnnnnnnnnnnnnnnnnnnnnnnnnnnnnnnnnnnnnnnnnnnnnnnnnnnnnnnnnnnnnnnnnnnnnnnnnnnnnnnnnnnnnnnnnnnnnnnnnnnnnnnnnnnnnnnnnnnnnnnnnnnnnnnnnnnnnnnnnnnnnnnnnnnnnnnnnnnnnnnnnnnnnnnnnnnnnnnnnnnnnnnnnnnnnnnnnnnnnnnnnnnnnnnnnnnnnnnnnnnnnnnnnnnnnnnnnnnnnnnnnnnnnnnnnnnnnnnnnnnnnnnnnnnnnnnnnnnnnnnnnnnnnnnnnnnnnnnnnnnnnnnnnnnnnnnnnnnnnnnnnnnnnnnnnnnnnnnnnnnnnnnnnnnnnnnnnnnnnnnnnnnnnnnnnnnnnnnnnnnnnnnnnnnnnnnnnnnnnnnnnnnnnnnnnnnnnnnnnnnnnnnnnnnnnnnnnnnnnnnnnnnnnnnnnnnnnnnnnnnnnnnnnnnnnnnnnnnnnnnnnnnnnnnnnnnnnnnnnnnnnnnnnnnnnnnnnnnnnnnnnnnnnnnnnnnnnnnnnnnnnnnnnnnnnnnnnnnnnnnnnnnnnnnnnnnnnnnnnnnnnnnnnnnnnnnnnnnnnnnnnnnnnnnnnnnnnnnnnnnnnnnnnnnnnnnnnnnnnnnnnnnnnnnnnnnnnnnnnnnnnnnnnnnnnnnnnnnnnnnnnnnnnnnnnnnnnnnnnnnnnnnnnnnnnnnnnnnnnnnnnnnnnnnnnnnnnnnnnnnnnnnnnnnnnnnnnnnnnnnnnnnnnnnnnnnnnnnnnnnnnnnnnnnnnnnnnnnnnnnnnnnnnnnnnnnnnnnnnnnnnnnnnnnnnnnnnnnnnnnnnnnnnnnnnnnnnnnnnnnnnnnnnnnnnnnnnnnnnnnnnnnnnnnnnnnnnnnnnnnnnnnnnnnnnnnnnnnnnnnnnnnnnnnnnnnnnnnnnnnnnnnnnnnnnnnnnnnnnnnnnnnnnnnnnnnnnnnnnnnnnnnnnnnnnnnnnnnnnnnnnnnnnnnnnnnnnnnnnnnnnnnnnnnnnnnnnnnnnnnnnnnnnnnnnnnnnnnnnnnnnnnnnnnnnnnnnnnnnnnnnnnnnnnnnnnnnnnnnnnnnnnnnnnnnnnnnnnnnnnnnnnnnnnnnnnnnnnnnnnnnnnnnnnnnnnnnnnnnnnnnnnnnnnnnnnnnnnnnnnnnnnnnnnnnnnnnnnnnnnnnnnnnnnnnnnnnnnnnnnnnnnnnnnnnnnnnnnnnnnnnnnnnnnnnnnnnnnnnnnnnnnnnnnnnnnnnnnnnnnnnnnnnnnnnnnnnnnnnnnnnnnnnnnnnnnnnnnnnnnnnnnnnnnnnnnnnnnnnnnnnnnnnnnnnnnnnnnnnnnnnnnnnnnnnnnnnnnnnnnnnnnnnnnnnnnnnnnnnnnnnnnnnnnnnnnnnnnnnnnnnnnnnnnnnnnnnnnnnnnnnnnnnnnnnnnnnnnnnnnnnnnnnnnnnnnnnnnnnnnnnnnnnnnnnnnnnnnnnnnnnnnnnnnnnnnnnnnnnnnnnnnnnnnnnnnnnnnnnnnnnnnnnnnnnnnnnnnnnnnnnnnnnnnnnnnnnnnnnnnnnnnnnnnnnnnnnnnnnnnnnnnnnnnnnnnnnnnnnnnnnnnnnnnnnnnnnnnnnnnnnnnnnnnnnnnnnnnnnnnnnnnnnnnnnnnnnnnnnnnnnnnnnnnnnnnnnnnnnnnnnnnnnnnnnnnnnnnnnnnnnnnnnnnnnnnnnnnnnnnnnnnnnnnnnnnnnnnnnnnnnnnnnnnnnnnnnnnnnnnnnnnnnnnnnnnnnnnnnnnnnnnnnnnnnnnnnnnnnnnnnnnnnnnnnnnnnnnnnnnnnnnnnnnnnnnnnnnnnnnnnnnnnnnnnnnnnnnnnnnnnnnnnnnnnnnnnnnnnnnnnnnnnnnnnnnnnnnnnnnnnnnnnnnnnnnnnnnnnnnnnnnnnnnnnnnnnnnnnnnnnnnnnnnnnnnnnnnnnnnnnnnnnnnnnnnnnnnnnnnnnnnnnnnnnnnnnnnnnnnnnnnnnnnnnnnnnnnnnnnnnnnnnnnnnnnnnnnnnnnnnnnnnnnnnnnnnnnnnnnnnnnnnnnnnnnnnnnnnnnnnnnnnnnnnnnnnnnnnnnnnnnnnnnnnnnnnnnnnnnnnnnnnnnnnnnnnnnnnnnnnnnnnnnnnnnnnnnnnnnnnnnnnnnnnnnnnnnnnnnnnnnnnnnnnnnnnnnnnnnnnnnnnnnnnnnnnnnnnnnnnnnnnnnnnnnnnnnnnnnnnnnnnnnnnnnnnnnnnnnnnnnnnnnnnnnnnnnnnnnnnnnnnnnnnnnnnnnnnnnnnnnnnnnnnnnnnnnnnnnnnnnnnnnnnnnnnnnnnnnnnnnnnnnnnnnnnnnnnnnnnnnnnnnnnnnnnnnnnnnnnnnnnnnnnnnnnnnnnnnnnnnnnnnnnnnnnnnnnnnnnnnnnnnnnnnnnnnnnnnnnnnnnnnnnnnnnnnnnnnnnnnnnnnnnnnnnnnnnnnnnnnnnnnnnnnnnnnnnnnnnnnnnnnnnnnnnnnnnnnnnnnnnnnnnnnnnnnnnnnnnnnnnnnnnnnnnnnnnnnnnnnnnnnnnnnnnnnnnnnnnnnnnnnnnnnnnnnnnnnnnnnnnnnnnnnnnnnnnnnnnnnnnnnnnnnnnnnnnnnnnnnnnnnnnnnnnnnnnnnnnnnnnnnnnnnnnnnnnnnnnnnnnnnnnnnnnnnnnnnnnnnnnnnnnnnnnnnnnnnnnnnnnnnnnnnnnnnnnnnnnnnnnnnnnnnnnnnnnnnnnnnnnnnnnnnnnnnnnnnnnnnnnnnnnnnnnnnnnnnnnnnnnnnnnnnnnnnnnnnnnnnnnnnnnnnnnnnnnnnnnnnnnnnnnnnnnnnnnnnnnnnnnnnnnnnnnnnnnnnnnnnnnnnnnnnnnnnnnnnnnnnnnnnnnnnnnnnnnnnnnnnnnnnnnnnnnnnnnnnnnnnnnnnnnnnnnnnnnnnnnnnnnnnnnnnnnnnnnnnnnnnnnnnnnnnnnnnnnnnnnnnnnnnnnnnnnnnnnnnnnnnnnnnnnnnnnnnnnnnnnnnnnnnnnnnnnnnnnnnnnnnnnnnnnnnnnnnnnnnnnnnnnnnnnnnnnnnnnnnnnnnnnnnnnnnnnnnnnnnnnnnnnnnnnnnnnnnnnnnnnnnnnnnnnnnnnnnnnnnnnnnnnnnnnnnnnnnnnnnnnnnnnnnnnnnnnnnnnnnnnnnnnnnnnnnnnnnnnnnnnnnnnnnnnnnnnnnnnnnnnnnnnnnnnnnnnnnnnnnnnnnnnnnnnnnnnnnnnnnnnnnnnnnnnnnnnnnnnnnnnnnnnnnnnnnnnnnnnnnnnnnnnnnnnnnnnnnnnnnnnnnnnnnnnnnnnnnnnnnnnnnnnnnnnnnnnnnnnnnnnnnnnnnnnnnnnnnnnnnnnnnnnnnnnnnnnnnnnnnnnnnnnnnnnnnnnnnnnnnnnnnnnnnnnnnnnnnnnnnnnnnnnnnnnnnnnnnnnnnnnnnnnnnnnnnnnnnnnnnnnnnnnnnnnnnnnnnnnnnnnnnnnnnnnnnnnnnnnnnnnnnnnnnnnnnnnnnnnnnnnnnnnnnnnnnnnnnnnnnnnnnnnnnnnnnnnnnnnnnnnnnnnnnnnnnnnnnnnnnnnnnnnnnnnnnnnnnnnnnnnnnnnnnnnnnnnnnnnnnnnnnnnnnnnnnnnnnnnnnnnnnnnnnnnnnnnnnnnnnnnnnnnnnnnnnnnnnnnnnnnnnnnnnnnnnnnnnnnnnnnnnnnnnnnnnnnnnnnnnnnnnnnnnnnnnnnnnnnnnnnnnnnnnnnnnnnnnnnnnnnnnnnnnnnnnnnnnnnnnnnnnnnnnnnnnnnnnnnnnnnnnnnnnnnnnnnnnnnnnnnnnnnnnnnnnnnnnnnnnnnnnnnnnnnnnnnnnnnnnnnnnnnnnnnnnnnnnnnnnnnnnnnnnnnnnnnnnnnnnnnnnnnnnnnnnnnnnnnnnnnnnnnnnnnnnnnnnnnnnnnnnnnnnnnnnnnnnnnnnnnnnnnnnnnnnnnnnnnnnnnnnnnnnnnnnnnnnnnnnnnnnnnnnnnnnnnnnnnnnnnnnnnnnnnnnnnnnnnnnnnnnnnnnnnnnnnnnnnnnnnnnnnnnnnnnnnnnnnnnnnnnnnnnnnnnnnnnnnnnnnnnnnnnnnnnnnnnnnnnnnnnnnnnnnnnnnnnnnnnnnnnnnnnnnnnnnnnnnnnnnnnnnnnnnnnnnnnnnnnnnnnnnnnnnnnnnnnnnnnnnnnnnnnnnnnnnnnnnnnnnnnnnnnnnnnnnnnnnnnnnnnnnnnnnnnnnnnnnnnnnnnnnnnnnnnnnnnnnnnnnnnnnnnnnnnnnnnnnnnnnnnnnnnnnnnnnnnnnnnnnnnnnnnnnnnnnnnnnnnnnnnnnnnnnnnnnnnnnnnnnnnnnnnnnnnnnnnnnnnnnnnnnnnnnnnnnnnnnnnnnnnnnnnnnnnnnnnnnnnnnnnnnnnnnnnnnnnnnnnnnnnnnnnnnnnnnnnnnnnnnnnnnnnnnnnnnnnnnnnnnnnnnnnnnnnnnnnnnnnnnnnnnnnnnnnnnnnnnnnnnnnnnnnnnnnnnnnnnnnnnnnnnnnnnnnnnnnnnnnnnnnnnnnnnnnnnnnnnnnnnnnnnnnnnnnnnnnnnnnnnnnnnnnnnnnnnnnnnnnnnnnnnnnnnnnnnnnnnnnnnnnnnnnnnnnnnnnnnnnnnnnnnnnnnnnnnnnnnnnnnnnnnnnnnnnnnnnnnnnnnnnnnnnnnnnnnnnnnnnnnnnnnnnnnnnnnnnnnnnnnnnnnnnnnnnnnnnnnnnnnnnnnnnnnnnnnnnnnnnnnnnnnnnnnnnnnnnnnnnnnnnnnnnnnnnnnnnnnnnnnnnnnnnnnnnnnnnnnnnnnnnnnnnnnnnnnnnnnnnnnnnnnnnnnnnnnnnnnnnnnnnnnnnnnnnnnnnnnnnnnnnnnnnnnnnnnnnnnnnnnnnnnnnnnnnnnnnnnnnnnnnnnnnnnnnnnnnnnnnnnnnnnnnnnnnnnnnnnnnnnnnnnnnnnnnnnnnnnnnnnnnnnnnnnnnnnnnnnnnnnnnnnnnnnnnnnnnnnnnnnnnnnnnnnnnnnnnnnnnnnnnnnnnnnnnnnnnnnnnnnnnnnnnnnnnnnnnnnnnnnnnnnnnnnnnnnnnnnnnnnnnnnnnnnnnnnnnnnnnnnnnnnnnnnnnnnnnnnnnnnnnnnnnnnnnnnnnnnnnnnnnnnnnnnnnnnnnnnnnnnnnnnnnnnnnnnnnnnnnnnnnnnnnnnnnnnnnnnnnnnnnnnnnnnnnnnnnnnnnnnnnnnnnnnnnnnnnnnnnnnnnnnnnnnnnnnnnnnnnnnnnnnnnnnnnnnnnnnnnnnnnnnnnnnnnnnnnnnnnnnnnnnnnnnnnnnnnnnnnnnnnnnnnnnnnnnnnnnnnnnnnnnnnnnnnnnnnnnnnnnnnnnnnnnnnnnnnnnnnnnnnnnnnnnnnnnnnnnnnnnnnnnnnnnnnnnnnnnnnnnnnnnnnnnnnnnnnnnnnnnnnnnnnnnnnnnnnnnnnnnnnnnnnnnnnnnnnnnnnnnnnnnnnnnnnnnnnnnnnnnnnnnnnnnnnnnnnnnnnnnnnnnnnnnnnnnnnnnnnnnnnnnnnnnnnnnnnnnnnnnnnnnnnnnnnnnnnnnnnnnnnnnnnnnnnnnnnnnnnnnnnnnnnnnnnnnnnnnnnnnnnnnnnnnnnnnnnnnnnnnnnnnnnnnnnnnnnnnnnnnnnnnnnnnnnnnnnnnnnnnnnnnnnnnnnnnnnnnnnnnnnnnnnnnnnnnnnnnnnnnnnnnnnnnnnnnnnnnnnnnnnnnnnnnnnnnnnnnnnnnnnnnnnnnnnnnnnnnnnnnnnnnnnnnnnnnnnnnnnnnnnnnnnnnnnnnnnnnnnnnnnnnnnnnnnnnnnnnnnnnnnnnnnnnnnnnnnnnnnnnnnnnnnnnnnnnnnnnnnnnnnnnnnnnnnnnnnnnnnnnnnnnnnnnnnnnnnnnnnnnnnnnnnnnnnnnnnnnnnnnnnnnnnnnnnnnnnnnnnnnnnnnnnnnnnnnnnnnnnnnnnnnnnnnnnnnnnnnnnnnnnnnnnnnnnnnnnnnnnnnnnnnnnnnnnnnnnnnnnnnnnnnnnnnnnnnnnnnnnnnnnnnnnnnnnnnnnnnnnnnnnnnnnnnnnnnnnnnnnnnnnnnnnnnnnnnnnnnnnnnnnnnnnnnnnnnnnnnnnnnnnnnnnnnnnnnnnnnnnnnnnnnnnnnnnnnnnnnnnnnnnnnnnnnnnnnnnnnnnnnnnnnnnnnnnnnnnnnnnnnnnnnnnnnnnnnnnnnnnnnnnnnnnnnnnnnnnnnnnnnnnnnnnnnnnnnnnnnnnnnnnnnnnnnnnnnnnnnnnnnnnnnnnnnnnnnnnnnnnnnnnnnnnnnnnnnnnnnnnnnnnnnnnnnnnnnnnnnnnnnnnnnnnnnnnnnnnnnnnnnnnnnnnnnnnnnnnnnnnnnnnnnnnnnnnnnnnnnnnnnnnnnnnnnnnnnnnnnnnnnnnnnnnnnnnnnnnnnnnnnnnnnnnnnnnnnnnnnnnnnnnnnnnnnnnnnnnnnnnnnnnnnnnnnnnnnnnnnnnnnnnnnnnnnnnnnnnnnnnnnnnnnnnnnnnnnnnnnnnnnnnnnnnnnnnnnnnnnnnnnnnnnnnnnnnnnnnnnnnnnnnnnnnnnnnnnnnnnnnnnnnnnnnnnnnnnnnnnnnnnnnnnnnnnnnnnnnnnnnnnnnnnnnnnnnnnnnnnnnnnnnnnnnnnnnnnnnnnnnnnnnnnnnnnnnnnnnnnnnnnnnnnnnnnnnnnnnnnnnnnnnnnnnnnnnnnnnnnnnnnnnnnnnnnnnnnnnnnnnnnnnnnnnnnnnnnnnnnnnnnnnnnnnnnnnnnnnnnnnnnnnnnnnnnnnnnnnnnnnnnnnnnnnnnnnnnnnnnnnnnnnnnnnnnnnnnnnnnnnnnnnnnnnnnnnnnnnnnnnnnnnnnnnnnnnnnnnnnnnnnnnnnnnnnnnnnnnnnnnnnnnnnnnnnnnnnnnnnnnnnnnnnnnnnnnnnnnnnnnnnnnnnnnnnnnnnnnnnnnnnnnnnnnnnnnnnnnnnnnnnnnnnnnnnnnnnnnnnnnnnnnnnnnnnnnnnnnnnnnnnnnnnnnnnnnnnnnnnnnnnnnnnnnnnnnnnnnnnnnnnnnnnnnnnnnnnnnnnnnnnnnnnnnnnnnnnnnnnnnnnnnnnnnnnnnnnnnnnnnnnnnnnnnnnnnnnnnnnnnnnnnnnnnnnnnnnnnnnnnnnnnnnnnnnnnnnnnnnnnnnnnnnnnnnnnnnnnnnnnnnnnnnnnnnnnnnnnnnnnnnnnnnnnnnnnnnnnnnnnnnnnnnnnnnnnnnnnnnnnnnnnnnnnnnnnnnnnnnnnnnnnnnnnnnnnnnnnnnnnnnnnnnnnnnnnnnnnnnnnnnnnnnnnnnnnnnnnnnnnnnnnnnnnnnnnnnnnnnnnnnnnnnnnnnnnnnnnnnnnnnnnnnnnnnnnnnnnnnnnnnnnnnnnnnnnnnnnnnnnnnnnnnnnnnnnnnnnnnnnnnnnnnnnnnnnnnnnnnnnnnnnnnnnnnnnnnnnnnnnnnnnnnnnnnnnnnnnnnnnnnnnnnnnnnnnnnnnnnnnnnnnnnnnnnnnnnnnnnnnnnnnnnnnnnnnnnnnnnnnnnnnnnnnnnnnnnnnnnnnnnnnnnnnnnnnnnnnnnnnnnnnnnnnnnnnnnnnnnnnnnnnnnnnnnnnnnnnnnnnnnnnnnnnnnnnnnnnnnnnnnnnnnnnnnnnnnnnnnnnnnnnnnnnnnnnnnnnnnnnnnnnnnnnnnnnnnnnnnnnnnnnnnnnnnnnnnnnnnnnnnnnnnnnnnnnnnnnnnnnnnnnnnnnnnnnnnnnnnnnnnnnnnnnnnnnnnnnnnnnnnnnnnnnnnnnnnnnnnnnnnnnnnnnnnnnnnnnnnnnnnnnnnnnnnnnnnnnnnnnnnnnnnnnnnnnnnnnnnnnnnnnnnnnnnnnnnnnnnnnnnnnnnnnnnnnnnnnnnnnnnnnnnnnnnnnnnnnnnnnnnnnnnnnnnnnnnnnnnnnnnnnnnnnnnnnnnnnnnnnnnnnnnnnnnnnnnnnnnnnnnnnnnnnnnnnnnnnnnnnnnnnnnnnnnnnnnnnnnnnnnnnnnnnnnnnnnnnnnnnnnnnnnnnnnnnnnnnnnnnnnnnnnnnnnnnnnnnnnnnnnnnnnnnnnnnnnnnnnnnnnnnnnnnnnnnnnnnnnnnnnnnnnnnnnnnnnnnnnnnnnnnnnnnnnnnnnnnnnnnnnnnnnnnnnnnnnnnnnnnnnnnnnnnnnnnnnnnnnnnnnnnnnnnnnnnnnnnnnnnnnnnnnnnnnnnnnnnnnnnnnnnnnnnnnnnnnnnnnnnnnnnnnnnnnnnnnnnnnnnnnnnnnnnnnnnnnnnnnnnnnnnnnnnnnnnnnnnnnnnnnnnnnnnnnnnnnnnnnnnnnnnnnnnnnnnnnnnnnnnnnnnnnnnnnnnnnnnnnnnnnnnnnnnnnnnnnnnnnnnnnnnnnnnnnnnnnnnnnnnnnnnnnnnnnnnnnnnnnnnnnnnnnnnnnnnnnnnnnnnnnnnnnnnnnnnnnnnnnnnnnnnnnnnnnnnnnnnnnnnnnnnnnnnnnnnnnnnnnnnnnnnnnnnnnnnnnnnnnnnnnnnnnnnnnnnnnnnnnnnnnnnnnnnnnnnnnnnnnnnnnnnnnnnnnnnnnnnnnnnnnnnnnnnnnnnnnnnnnnnnnnnnnnnnnnnnnnnnnnnnnnnnnnnnnnnnnnnnnnnnnnnnnnnnnnnnnnnnnnnnnnnnnnnnnnnnnnnnnnnnnnnnnnnnnnnnnnnnnnnnnnnnnnnnnnnnnnnnnnnnnnnnnnnnnnnnnnnnnnnnnnnnnnnnnnnnnnnnnnnnnnnnnnnnnnnnnnnnnnnnnnnnnnnnnnnnnnnnnnnnnnnnnnnnnnnnnnnnnnnnnnnnnnnnnnnnnnnnnnnnnnnnnnnnnnnnnnnnnnnnnnnnnnnnnnnnnnnnnnnnnnnnnnnnnnnnnnnnnnnnnnnnnnnnnnnnnnnnnnnnnnnnnnnnnnnnnnnnnnnnnnnnnnnnnnnnnnnnnnnnnnnnnnnnnnnnnnnnnnnnnnnnnnnnnnnnnnnnnnnnnnnnnnnnnnnnnnnnnnnnnnnnnnnnnnnnnnnnnnnnnnnnnnnnnnnnnnnnnnnnnnnnnnnnnnnnnnnnnnnnnnnnnnnnnnnnnnnnnnnnnnnnnnnnnnnnnnnnnnnnnnnnnnnnnnnnnnnnnnnnnnnnnnnnnnnnnnnnnnnnnnnnnnnnnnnnnnnnnnnnnnnnnnnnnnnnnnnnnnnnnnnnnnnnnnnnnnnnnnnnnnnnnnnnnnnnnnnnnnnnnnnnnnnnnnnnnnnnnnnnnnnnnnnnnnnnnnnnnnnnnnnnnnnnnnnnnnnnnnnnnnnnnnnnnnnnnnnnnnnnnnnnnnnnnnnnnnnnnnnnnnnnnnnnnnnnnnnnnnnnnnnnnnnnnnnnnnnnnnnnnnnnnnnnnnnnnnnnnnnnnnnnnnnnnnnnnnnnnnnnnnnnnnnnnnnnnnnnnnnnnnnnnnnnnnnnnnnnnnnnnnnnnnnnnnnnnnnnnnnnnnnnnnnnnnnnnnnnnnnnnnnnnnnnnnnnnnnnnnnnnnnnnnnnnnnnnnnnnnnnnnnnnnnnnnnnnnnnnnnnnnnnnnnnnnnnnnnnnnnnnnnnnnnnnnnnnnnnnnnnnnnnnnnnnnnnnnnnnnnnnnnnnnnnnnnnnnnnnnnnnnnnnnnnnnnnnnnnnnnnnnnnnnnnnnnnnnnnnnnnnnnnnnnnnnnnnnnnnnnnnnnnnnnnnnnnnnnnnnnnnnnnnnnnnnnnnnnnnnnnnnnnnnnnnnnnnnnnnnnnnnnnnnnnnnnnnnnnnnnnnnnnnnnnnnnnnnnnnnnnnnnnnnnnnnnnnnnnnnnnnnnnnnnnnnnnnnnnnnnnnnnnnnnnnnnnnnnnnnnnnnnnnnnnnnnnnnnnnnnnnnnnnnnnnnnnnnnnnnnnnnnnnnnnnnnnnnnnnnnnnnnnnnnnnnnnnnnnnnnnnnnnnnnnnnnnnnnnnnnnnnnnnnnnnnnnnnnnnnnnnnnnnnnnnnnnnnnnnnnnnnnnnnnnnnnnnnnnnnnnnnnnnnnnnnnnnnnnnnnnnnnnnnnnnnnnnnnnnnnnnnnnnnnnnnnnnnnnnnnnnnnnnnnnnnnnnnnnnnnnnnnnnnnnnnnnnnnnnnnnnnnnnnnnnnnnnnnnnnnnnnnnnnnnnnnnnnnnnnnnnnnnnnnnnnnnnnnnnnnnnnnnnnnnnnnnnnnnnnnnnnnnnnnnnnnnnnnnnnnnnnnnnnnnnnnnnnnnnnnnnnnnnnnnnnnnnnnnnnnnnnnnnnnnnnnnnnnnnnnnnnnnnnnnnnnnnnnnnnnnnnnnnnnnnnnnnnnnnnnnnnnnnnnnnnnnnnnnnnnnnnnnnnnnnnnnnnnnnnnnnnnnnnnnnnnnnnnnnnnnnnnnnnnnnnnnnnnnnnnnnnnnnnnnnnnnnnnnnnnnnnnnnnnnnnnnnnnnnnnnnnnnnnnnnnnnnnnnnnnnnnnnnnnnnnnnnnnnnnnnnnnnnnnnnnnnnnnnnnnnnnnnnnnnnnnnnnnnnnnnnnnnnnnnnnnnnnnnnnnnnnnnnnnnnnnnnnnnnnnnnnnnnnnnnnnnnnnnnnnnnnnnnnnnnnnnnnnnnnnnnnnnnnnnnnnnnnnnnnnnnnnnnnnnnnnnnnnnnnnnnnnnnnnnnnnnnnnnnnnnnnnnnnnnnnnnnnnnnnnnnnnnnnnnnnnnnnnnnnnnnnnnnnnnnnnnnnnnnnnnnnnnnnnnnnnnnnnnnnnnnnnnnnnnnnnnnnnnnnnnnnnnnnnnnnnnnnnnnnnnnnnnnnnnnnnnnnnnnnnnnnnnnnnnnnnnnnnnnnnnnnnnnnnnnnnnnnnnnnnnnnnnnnnnnnnnnnnnnnnnnnnnnnnnnnnnnnnnnnnnnnnnnnnnnnnnnnnnnnnnnnnnnnnnnnnnnnnnnnnnnnnnnnnnnnnnnnnnnnnnnnnnnnnnnnnnnnnnnnnnnnnnnnnnnnnnnnnnnnnnnnnnnnnnnnnnnnnnnnnnnnnnnnnnnnnnnnnnnnnnnnnnnnnnnnnnnnnnnnnnnnnnnnnnnnnnnnnnnnnnnnnnnnnnnnnnnnnnnnnnnnnnnnnnnnnnnnnnnnnnnnnnnnnnnnnnnnnnnnnnnnnnnnnnnnnnnnnnnnnnnnnnnnnnnnnnnnnnnnnnnnnnnnnnnnnnnnnnnnnnnnnnnnnnnnnnnnnnnnnnnnnnnnnnnnnnnnnnnnnnnnnnnnnnnnnnnnnnnnnnnnnnnnnnnnnnnnnnnnnnnnnnnnnnnnnnnnnnnnnnnnnnnnnnnnnnnnnnnnnnnnnnnnnnnnnnnnnnnnnnnnnnnnnnnnnnnnnnnnnnnnnnnnnnnnnnnnnnnnnnnnnnnnnnnnnnnnnnnnnnnnnnnnnnnnnnnnnnnnnnnnnnnnnnnnnnnnnnnnnnnnnnnnnnnnnnnnnnnnnnnnnnnnnnnnnnnnnnnnnnnnnnnnnnnnnnnnnnnnnnnnnnnnnnnnnnnnnnnnnnnnnnnnnnnnnnnnnnnnnnnnnnnnnnnnnnnnnnnnnnnnnnnnnnnnnnnnnnnnnnnnnnnnnnnnnnnnnnnnnnnnnnnnnnnnnnnnnnnnnnnnnnnnnnnnnnnnnnnnnnnnnnnnnnnnnnnnnnnnnnnnnnnnnnnnnnnnnnnnnnnnnnnnnnnnnnnnnnnnnnnnnnnnnnnnnnnnnnnnnnnnnnnnnnnnnnnnnnnnnnnnnnnnnnnnnnnnnnnnnnnnnnnnnnnnnnnnnnnnnnnnnnnnnnnnnnnnnnnnnnnnnnnnnnnnnnnnnnnnnnnnnnnnnnnnnnnnnnnnnnnnnnnnnnnnnnnnnnnnnnnnnnnnnnnnnnnnnnnnnnnnnnnnnnnnnnnnnnnnnnnnnnnnnnnnnnnnnnnnnnnnnnnnnnnnnnnnnnnnnnnnnnnnnnnnnnnnnnnnnnnnnnnnnnnnnnnnnnnnnnnnnnnnnnnnnnnnnnnnnnnnnnnnnnnnnnnnnnnnnnnnnnnnnnnnnnnnnnnnnnnnnnnnnnnnnnnnnnnnnnnnnnnnnnnnnnnnnnnnnnnnnnnnnnnnnnnnnnnnnnnnnnnnnnnnnnnnnnnnnnnnnnnnnnnnnnnnnnnnnnnnnnnnnnnnnnnnnnnnnnnnnnnnnnnnnnnnnnnnnnnnnnnnnnnnnnnnnnnnnnnnnnnnnnnnnnnnnnnnnnnnnnnnnnnnnnnnnnnnnnnnnnnnnnnnnnnnnnnnnnnnnnnnnnnnnnnnnnnnnnnnnnnnnnnnnnnnnnnnnnnnnnnnnnnnnnnnnnnnnnnnnnnnnnnnnnnnnnnnnnnnnnnnnnnnnnnnnnnnnnnnnnnnnnnnnnnnnnnnnnnnnnnnnnnnnnnnnnnnnnnnnnnnnnnnnnnnnnnnnnnnnnnnnnnnnnnnnnnnnnnnnnnnnnnnnnnnnnnnnnnnnnnnnnnnnnnnnnnnnnnnnnnnnnnnnnnnnnnnnnnnnnnnnnnnnnnnnnnnnnnnnnnnnnnnnnnnnnnnnnnnnnnnnnnnnnnnnnnnnnnnnnnnnnnnnnnnnnnnnnnnnnnnnnnnnnnnnnnnnnnnnnnnnnnnnnnnnnnnnnnnnnnnnnnnnnnnnnnnnnnnnnnnnnnnnnnnnnnnnnnnnnnnnnnnnnnnnnnnnnnnnnnnnnnnnnnnnnnnnnnnnnnnnnnnnnnnnnnnnnnnnnnnnnnnnnnnnnnnnnnnnnnnnnnnnnnnnnnnnnnnnnnnnnnnnnnnnnnnnnnnnnnnnnnnnnnnnnnnnnnnnnnnnnnnnnnnnnnnnnnnnnnnnnnnnnnnnnnnnnnnnnnnnnnnnnnnnnnnnnnnnnnnnnnnnnnnnnnnnnnnnnnnnnnnnnnnnnnnnnnnnnnnnnnnnnnnnnnnnnnnnnnnnnnnnnnnnnnnnnnnnnnnnnnnnnnnnnnnnnnnnnnnnnnnnnnnnnnnnnnnnnnnnnnnnnnnnnnnnnnnnnnnnnnnnnnnnnnnnnnnnnnnnnnnnnnnnnnnnnnnnnnnnnnnnnnnnnnnnnnnnnnnnnnnnnnnnnnnnnnnnnnnnnnnnnnnnnnnnnnnnnnnnnnnnnnnnnnnnnnnnnnnnnnnnnnnnnnnnnnnnnnnnnnnnnnnnnnnnnnnnnnnnnnnnnnnnnnnnnnnnnnnnnnnnnnnnnnnnnnnnnnnnnnnnnnnnnnnnnnnnnnnnnnnnnnnnnnnnnnnnnnnnnnnnnnnnnnnnnnnnnnnnnnnnnnnnnnnnnnnnnnnnnnnnnnnnnnnnnnnnnnnnnnnnnnnnnnnnnnnnnnnnnnnnnnnnnnnnnnnnnnnnnnnnnnnnnnnnnnnnnnnnnnnnnnnnnnnnnnnnnnnnnnnnnnnnnnnnnnnnnnnnnnnnnnnnnnnnnnnnnnnnnnnnnnnnnnnnnnnnnnnnnnnnnnnnnnnnnnnnnnnnnnnnnnnnnnnnnnnnnnnnnnnnnnnnnnnnnnnnnnnnnnnnnnnnnnnnnnnnnnnnnnnnnnnnnnnnnnnnnnnnnnnnnnnnnnnnnnnnnnnnnnnnnnnnnnnnnnnnnnnnnnnnnnnnnnnnnnnnnnnnnnnnnnnnnnnnnnnnnnnnnnnnnnnnnnnnnnnnnnnnnnnnnnnnnnnnnnnnnnnnnnnnnnnnnnnnnnnnnnnnnnnnnnnnnnnnnnnnnnnnnnnnnnnnnnnnnnnnnnnnnnnnnnnnnnnnnnnnnnnnnnnnnnnnnnnnnnnnnnnnnnnnnnnnnnnnnnnnnnnnnnnnnnnnnnnnnnnnnnnnnnnnnnnnnnnnnnnnnnnnnnnnnnnnnnnnnnnnnnnnnnnnnnnnnnnnnnnnnnnnnnnnnnnnnnnnnnnnnnnnnnnnnnnnnnnnnnnnnnnnnnnnnnnnnnnnnnnnnnnnnnnnnnnnnnnnnnnnnnnnnnnnnnnnnnnnnnnnnnnnnnnnnnnnnnnnnnnnnnnnnnnnnnnnnnnnnnnnnnnnnnnnnnnnnnnnnnnnnnnnnnnnnnnnnnnnnnnnnnnnnnnnnnnnnnnnnnnnnnnnnnnnnnnnnnnnnnnnnnnnnnnnnnnnnnnnnnnnnnnnnnnnnnnnnnnnnnnnnnnnnnnnnnnnnnnnnnnnnnnnnnnnnnnnnnnnnnnnnnnnnnnnnnnnnnnnnnnnnnnnnnnnnnnnnnnnnnnnnnnnnnnnnnnnnnnnnnnnnnnnnnnnnnnnnnnnnnnnnnnnnnnnnnnnnnnnnnnnnnnnnnnnnnnnnnnnnnnnnnnnnnnnnnnnnnnnnnnnnnnnnnnnnnnnnnnnnnnnnnnnnnnnnnnnnnnnnnnnnnnnnnnnnnnnnnnnnnnnnnnnnnnnnnnnnnnnnnnnnnnnnnnnnnnnnnnnnnnnnnnnnnnnnnnnnnnnnnnnnnnnnnnnnnnnnnnnnnnnnnnnnnnnnnnnnnnnnnnnnnnnnnnnnnnnnnnnnnnnnnnnnnnnnnnnnnnnnnnnnnnnnnnnnnnnnnnnnnnnnnnnnnnnnnnnnnnnnnnnnnnnnnnnnnnnnnnnnnnnnnnnnnnnnnnnnnnnnnnnnnnnnnnnnnnnnnnnnnnnnnnnnnnnnnnnnnnnnnnnnnnnnnnnnnnnnnnnnnnnnnnnnnnnnnnnnnnnnnnnnnnnnnnnnnnnnnnnnnnnnnnnnnnnnnnnnnnnnnnnnnnnnnnnnnnnnnnnnnnnnnnnnnnnnnnnnnnnnnnnnnnnnnnnnnnnnnnnnnnnnnnnnnnnnnnnnnnnnnnnnnnnnnnnnnnnnnnnnnnnnnnnnnnnnnnnnnnnnnnnnnnnnnnnnnnnnnnnnnnnnnnnnnnnnnnnnnnnnnnnnnnnnnnnnnnnnnnnnnnnnnnnnnnnnnnnnnnnnnnnnnnnnnnnnnnnnnnnnnnnnnnnnnnnnnnnnnnnnnnnnnnnnnnnnnnnnnnnnnnnnnnnnnnnnnnnnnnnnnnnnnnnnnnnnnnnnnnnnnnnnnnnnnnnnnnnnnnnnnnnnnnnnnnnnnnnnnnnnnnnnnnnnnnnnnnnnnnnnnnnnnnnnnnnnnnnnnnnnnnnnnnnnnnnnnnnnnnnnnnnnnnnnnnnnnnnnnnnnnnnnnnnnnnnnnnnnnnnnnnnnnnnnnnnnnnnnnnnnnnnnnnnnnnnnnnnnnnnnnnnnnnnnnnnnnnnnnnnnnnnnnnnnnnnnnnnnnnnnnnnnnnnnnnnnnnnnnnnnnnnnnnnnnnnnnnnnnnnnnnnnnnnnnnnnnnnnnnnnnnnnnnnnnnnnnnnnnnnnnnnnnnnnnnnnnnnnnnnnnnnnnnnnnnnnnnnnnnnnnnnnnnnnnnnnnnnnnnnnnnnnnnnnnnnnnnnnnnnnnnnnnnnnnnnnnnnnnnnnnnnnnnnnnnnnnnnnnnnnnnnnnnnnnnnnnnnnnnnnnnnnnnnnnnnnnnnnnnnnnnnnnnnnnnnnnnnnnnnnnnnnnnnnnnnnnnnnnnnnnnnnnnnnnnnnnnnnnnnnnnnnnnnnnnnnnnnnnnnnnnnnnnnnnnnnnnnnnnnnnnnnnnnnnnnnnnnnnnnnnnnnnnnnnnnnnnnnnnnnnnnnnnnnnnnnnnnnnnnnnnnnnnnnnnnnnnnnnnnnnnnnnnnnnnnnnnnnnnnnnnnnnnnnnnnnnnnnnnnnnnnnnnnnnnnnnnnnnnnnnnnnnnnnnnnnnnnnnnnnnnnnnnnnnnnnnnnnnnnnnnnnnnnnnnnnnnnnnnnnnnnnnnnnnnnnnnnnnnnnnnnnnnnnnnnnnnnnnnnnnnnnnnnnnnnnnnnnnnnnnnnnnnnnnnnnnnnnnnnnnnnnnnnnnnnnnnnnnnnnnnnnnnnnnnnnnnnnnnnnnnnnnnnnnnnnnnnnnnnnnnnnnnnnnnnnnnnnnnnnnnnnnnnnnnnnnnnnnnnnnnnnnnnnnnnnnnnnnnnnnnnnnnnnnnnnnnnnnnnnnnnnnnnnnnnnnnnnnnnnnnnnnnnnnnnnnnnnnnnnnnnnnnnnnnnnnnnnnnnnnnnnnnnnnnnnnnnnnnnnnnnnnnnnnnnnnnnnnnnnnnnnnnnnnnnnnnnnnnnnnnnnnnnnnnnnnnnnnnnnnnnnnnnnnnnnnnnnnnnnnnnnnnnnnnnnnnnnnnnnnnnnnnnnnnnnnnnnnnnnnnnnnnnnnnnnnnnnnnnnnnnnnnnnnnnnnnnnnnnnnnnnnnnnnnnnnnnnnnnnnnnnnnnnnnnnnnnnnnnnnnnnnnnnnnnnnnnnnnnnnnnnnnnnnnnnnnnnnnnnnnnnnnnnnnnnnnnnnnnnnnnnnnnnnnnnnnnnnnnnnnnnnnnnnnnnnnnnnnnnnnnnnnnnnnnnnnnnnnnnnnnnnnnnnnnnnnnnnnnnnnnnnnnnnnnnnnnnnnnnnnnnnnnnnnnnnnnnnnnnnnnnnnnnnnnnnnnnnnnnnnnnnnnnnnnnnnnnnnnnnnnnnnnnnnnnnnnnnnnnnnnnnnnnnnnnnnnnnnnnnnnnnnnnnnnnnnnnnnnnnnnnnnnnnnnnnnnnnnnnnnnnnnnnnnnnnnnnnnnnnnnnnnnnnnnnnnnnnnnnnnnnnnnnnnnnnnnnnnnnnnnnnnnnnnnnnnnnnnnnnnnnnnnnnnnnnnnnnnnnnnnnnnnnnnnnnnnnnnnnnnnnnnnnnnnnnnnnnnnnnnnnnnnnnnnnnnnnnnnnnnnnnnnnnnnnnnnnnnnnnnnnnnnnnnnnnnnnnnnnnnnnnnnnnnnnnnnnnnnnnnnnnnnnnnnnnnnnnnnnnnnnnnnnnnnnnnnnnnnnnnnnnnnnnnnnnnnnnnnnnnnnnnnnnnnnnnnnnnnnnnnnnnnnnnnnnnnnnnnnnnnnnnnnnnnnnnnnnnnnnnnnnnnnnnnnnnnnnnnnnnnnnnnnnnnnnnnnnnnnnnnnnnnnnnnnnnnnnnnnnnnnnnnnnnnnnnnnnnnnnnnnnnnnnnnnnnnnnnnnnnnnnnnnnnnnnnnnnnnnnnnnnnnnnnnnnnnnnnnnnnnnnnnnnnnnnnnnnnnnnnnnnnnnnnnnnnnnnnnnnnnnnnnnnnnnnnnnnnnnnnnnnnnnnnnnnnnnnnnnnnnnnnnnnnnnnnnnnnnnnnnnnnnnnnnnnnnnnnnnnnnnnnnnnnnnnnnnnnnnnnnnnnnnnnnnnnnnnnnnnnnnnnnnnnnnnnnnnnnnnnnnnnnnnnnnnnnnnnnnnnnnnnnnnnnnnnnnnnnnnnnnnnnnnnnnnnnnnnnnnnnnnnnnnnnnnnnnnnnnnnnnnnnnnnnnnnnnnnnnnnnnnnnnnnnnnnnnnnnnnnnnnnnnnnnnnnnnnnnnnnnnnnnnnnnnnnnnnnnnnnnnnnnnnnnnnnnnnnnnnnnnnnnnnnnnnnnnnnnnnnnnnnnnnnnnnnnnnnnnnnnnnnnnnnnnnnnnnnnnnnnnnnnnnnnnnnnnnnnnnnnnnnnnnnnnnnnnnnnnnnnnnnnnnnnnnnnnnnnnnnnnnnnnnnnnnnnnnnnnnnnnnnnnnnnnnnnnnnnnnnnnnnnnnnnnnnnnnnnnnnnnnnnnnnnnnnnnnnnnnnnnnnnnnnnnnnnnnnnnnnnnnnnnnnnnnnnnnnnnnnnnnnnnnnnnnnnnnnnnnnnnnnnnnnnnnnnnnnnnnnnnnnnnnnnnnnnnnnnnnnnnnnnnnnnnnnnnnnnnnnnnnnnnnnnnnnnnnnnnnnnnnnnnnnnnnnnnnnnnnnnnnnnnnnnnnnnnnnnnnnnnnnnnnnnnnnnnnnnnnnnnnnnnnnnnnnnnnnnnnnnnnnnnnnnnnnnnnnnnnnnnnnnnnnnnnnnnnnnnnnnnnnnnnnnnnnnnnnnnnnnnnnnnnnnnnnnnnnnnnnnnnnnnnnnnnnnnnnnnnnnnnnnnnnnnnnnnnnnnnnnnnnnnnnnnnnnnnnnnnnnnnnnnnnnnnnnnnnnnnnnnnnnnnnnnnnnnnnnnnnnnnnnnnnnnnnnnnnnnnnnnnnnnnnnnnnnnnnnnnnnnnnnnnnnnnnnnnnnnnnnnnnnnnnnnnnnnnnnnnnnnnnnnnnnnnnnnnnnnnnnnnnnnnnnnnnnnnnnnnnnnnnnnnnnnnnnnnnnnnnnnnnnnnnnnnnnnnnnnnnnnnnnnnnnnnnnnnnnnnnnnnnnnnnnnnnnnnnnnnnnnnnnnnnnnnnnnnnnnnnnnccccggcggcccctccccccggcggcccctcccctcggggggagggggtgagaggctacctcactccggccccctccccccggggggctgcccgcagggcgggggtgaggtcccggcagggggtgcccgcagggcggggggaggtccccgggggtgcccgcagggcgagggagagttctggcaggggctgcccgatgggcgggggagaagtagggggtgaagtaacggcgcggcccagtgcggacggaagcccaacggtgagccggggcaagggcagcgtgccgcgcttttcattcgcggcgcgatcgcgtacgctggatggagtggtctgtttcaggggcaccccaggggcaagggccttgttggaggtcctggatgcctcgccctatcctccccgttctatccgttctcactgcgctgattttgctggccggctgcatgggcgacgcccatgtgggcgccatgcatgacgccgaggactgcggctccggccacatgtccacgacccagggctgcgccaacacgacgcggggggcggataccgtcgcgctggacgcggtgctgaccgtccctgccgcgggcgccaccggggttgatccctccacgagcttcaccgtgatcttcaacgacgcggtgatcccggcgacggtgaacgccgccaccctgcaagtgcgggacagcagcgccacaagcacgccgggcaatacggtgcccggcagctacaccgtgcaaacctcggtcccggccgggggcggcgtcggcagcgcgacggccgtgttcgtccccgccacgcccttcggcgcgggggcgaccgtgagcatttccctcaccgccgggatcctggacgacgagggcttgccgctggtgtctccgcgcatcgtaagcttcaccatccggccgtagcggccgcgcgaaccgctccccccggcgggccagttctggctcccccgcggcggaactttccgcccccggctaacgccccgccgccggaagcggcaccggcgcgggctgggccgcgtcctgggcggacatgcggggctggggccggcggtagtccttgggcaggtgcgccagcaggcgcttgcggaaggcgtggtagtccacggtgatggtgtggcgcggcgtggccaactggtgcaggtccggatggtccacctccgcccggcagcgccgctccaggtcgtcgggcagcttccactcgccggtcatcacccgcgcggccagcttggcttgcagttccgccgcgggccagatgcagcccaggggctggaagagcccgatgaagaacagattgcggtgccgggcgtcgaacatcttgagccagagcggcacgggaccctgggagaagtccaccacggaggggtcgaagaaggggtgggaaatccagaagcccgtgcaggcgatgatcgtgtcgtactccccggaggacccgtccgtgaaatgcaccgtccggccctcgcagcgggcaatgtccggccgggggcggatgcggccgtggcgcatgaagtagagcagctcggagttcaccgtggggtgggtctggccgatgcggtggtcgggcttctgcaggccgtacttggcattgtctccctggatcagcttgagcgtcttctccatcagccagaagcgcagccagccggggaggaagggcaacatgcgcatcgtcttggcgttggtcacgtccaccggctcgcccaggaagaacttgggcagcacccagtagccgcggcgcatggagaggtccacggaggcggcgacgcgggaggtctccacggccacgtcgcaggcggagttgcccccgccgatcaccaggatgcgccgccccgcatggtccgccgcgcgcttgaaggcgtgggagtgcagcagcgtgccggtgaaggtgccgggatactccggcatgcgcggtcgccagtggtggccgttgctgaccgccacgtagtcgaacgcgcggctcgtgcgccgcccgccctgctcggtctccacctcccaggtgccgtccggattgggcgcgacgcgcagcacctccgtgcggaactggatgtggccatagagaccgaagtgccgggcgtaggcctggaagtagcgcgccaactggctgtgggaggggtattccgggtagtcctccggcatggggaagtcgtggtattgggagaacatcttggagctgatgatgtgcgtggtctcgaacacgctggagtggctgggcgcgggattgaagagccagttcccgcccacctcctcgttgcggtcgtaggccaccaggtgggtcaggccccggtccaggaagttcttcacggcggcgatgccggagggcccggcgccgatcacgcagacgcgcgtttcaggttgcatcgctctcccccaatggcggatggtggcggcccggcgttccggcggcaggccgcccgcggtcttggggggccgccccggggcgcggggtgcggttggcctacacggctaccacaggctgcccagccgggcaaccgagcgggaatcggctggaaggcggtttggccttggtagatttcagttcatgactcggggcagggagtgcaagggaatcgaagtggaccccatccgtgagatagctttaccctcggattaagctacagtccacgggttgtctccggtctcaagcgaccctgcttcttgctcctgtccggcatggtacacctcatcgggggtctggtaccccagcccctggtgaggccgctcccgatggtaccattccacccaggaccgtaacgcatagcgctggtcgtgtccgccgtcaaaggagtggccgcatagatagccgtgcgcattgtccgccagtccaacagtgccttgaatgccgcgccttaccacattcgcttctcgctcaatcgctcaccccttccatcaagtcgcaggttgctaatctcacgttccggttattggggccacctcggcggacccaacccaccctaatctggagtgaatgtcctttgccaaaatagttgaccgtggtattgggtgcaacaatccgtagatagccacttgccgttaaggttttcggaaggccctcttcagcaggcgccccgatgcccgaaactgtttccgccatggagccttaccgccccttctgggggaaggcgcgccccggggggccttctgaccctccctaccacccgctcgcgtaccacagtcttgacgtagcggccgtcggcgcatcgctcctggcgcgggacggctcgctgaggcagcggctggcggaactgaccgggctgcatgaaagcaccgccgcaggttggctcgccttctttctcgcgctgcacgacatcggcaagttcgccgagggctttcaggcgctgcaacgggacctgtttcgccgcttgcggagccgggacagtcgcagcgggtattccgtgcatcatgacagccttggctatgtgctgtggtctgagtacctgtggcccctggcctgggacgaggactggttcgggctgggcgcggctgcgcggcccgccgaggagcgagacgaatgggaagcggtgttccagggttgggcgctggcctgcaccggacaccacgggcggccccccacgcggcaggaaggggcagttttggccgtcccgtgcgccctgttactgccgtcccaccgaagggcccgacgctacccgtgatgccaccactcgcgcggctagacctattctgtccactgagcgtgatacgcgggaactaagctttggatttgtagcactctaggaacacaccgaacgcgccggtaggggagcgccgtatgcctctcgcactgtgcttttgcgttaatgggaccaagaggaaccgcccatgaactacaacctgctggaagaatcctggattccgattctccgaaacgacggacacgcggatcgggtgggaatccgagcagcccttgcgcaggctggcgccattcaccggatcgcggcgccgaatccgatggattgcgttgccctcctgcgattccttctggcggtgctttcatggtgcaagccggagttgaccaatgaagaccgcaagtcgctggcaggcgcgaagggcatcccatctgcgtggctgaaaaagcttgatgagcatgagggcaaatttaacttgctcggcaatgctgatcggttcttccaagacgagaagaccaaggcaaagacccggcccatcggggacctgcttcaggagtttccaaccgaaaccagcattgcccattttcgacacgtccgagatggcgactacggcttgtgccctgcctgctgtgccaccggaattatacgattctgtgcgtttgcaaacgcctatggaggcggccgatatacttccgcgatcaacggaccggcgccggtctatgcgatcgcccagggcggagacttgctacagtctctactgctgaactggtcgacaactgtaccgaagcgtgcacctccatggctatccaacaagccccctacgctcgatagcctggacatacccactgcgttcgcttggcggtcgcgtcaggtgtggctgggcgcccttgagaacgaggcggaaccctgcgcctactgcggccggtcagcccggctcgtcaagcaaatgaaattcaccggcggctggaagcctcccttcaaaaccaaggggcaggaaaaaaagttctgggatcaggatccccatttgattctggaacccagggcgcagagggatgaagcggacgagaacccgcgggaagctgtcggagacagcccggcggaggaggagtcgccgtcttacaggcctaccgaaatgacgaccatcgggttcccgtccccagggaaccgcgtcgcgaagcacgcccgattctggcggcgggcactcgccgcttgcctcctgcgccatgacatagcttccgggaccgccacgctggcggccatcactgttgccggaccggcggcgaacaaggggctgtatcaggacgccgccgagctttcattctcgccgccatttaatcaccccgctcacgcattcaggctcttgaacaatgcgacgcagctgttaaccggcgtgctgcggcaaagcacgcaaaaccccaaacaggagcatggtaaccgcaaagcggccctcgacgctctttcgccagcgctggagatgcggttacgcaatgtgttggcccgatggctcgccgccggcgaaacgtcccttgatgagttgatcgaacaggtctggccgacccttgaggccgtgatcgctagtaccaccttcggttcgccgctgcgtaggcgtgaagccgccatccgggccagggaggaattggaacgagcgatagctcggctggcggagcccgacaaagacaaggagccgctgaaggcctttggaagggtcaattcccgaaaacaccaataggaggtgaagccgatggaaatgaccaaatcctttgtggaccgcctacaggcactgaagagcggagagcgctcacgactgcgccggcttgcggaccgtccgctggacaggtcgcttgccggattcgacctgttcacgggcctgtggtggcctttgcgccggaagagtccgcgcgtaccacgacgcgaggcgagctggctcgtcggtaagctctttggggcctatccgctcgaacaccgtgacagggaagacttccacttggccgtcatgctcgggagatgcgaacccgctgacgaaaagaagagggagcgcttccgccgtcgcttcgatgccctgctgcaatcgcccctgcacgccattgaacctcacttgcggtgggctattcgggtgacagccaccgttccggcggatgggaaatcgccaggattgaactgggttcggttgctcgacgatctttcgcgttgggaccagccccaacgctatcacgaacaatccacggttgcggatgagtgggccaacagttacctcgatgccgtcccttcccttcaaaggagatgaccatgcttgtcgaattgcacatgatccagaaccacaatcccgccaacctgaatcgggatgacctgggcgcgccaaagacttgcctgttcggtggcgtgatccgtgcccgcatttccagccagtgcttgaagcgcaccattcgcagaggcgcggactttcagaaggccctggagagagacggcggcatacgtacccgcagactcatcacggaattggccgagcgggccagcggttcctcgccggccccggatgaagcggtcaagttggtggcagatgcattcgacaaaggtggtgtaaagagaacgggcaagggcgaagagccggacaacaccgaggtcctgttgttcatcccgagatcaactctggacaagatggtgaatgcggtgcgcgaggcttggcgcggaaaggtcaagtccgcggtattgtgcgaggaactcgcaaccctgctcggcgagaaagtatcggtgcccgatatggccttgtccggtcggatgaccgagctggaatccaaggggctattccgcaagattgacttccacgtcgaggccgcgctttccgccgcccatgccatatccactcacgcggtcatcaacgaggtggactacttcaccgccgcggacgacctggcgaaaggcagcggggccgcgcacgtgaacgaggccatgttcaattcggcgtgcttctacaagcatttcagcattgactgggacaaacttgtgagcaacttgggtgacgattcggacttggcgagcctgacgattcgacatttcatccaagccgccgccagggaaaccccgacgggcaaacagcatgccttcgccgccttcaacccgcccgaggggattcttgtcgagatcaaggcaaagcgagccgtgccgatcagccatgccaatgcattcgccgaccccgtcccggccaacgcgccgcgcggcttgatcggcgaaagcatcgcgcgactgggtcagcatgttcacgacatcgcggaggggtatggaatcgaagccgatcggttctggttttcgccggccgcccgccacgatcttacctacattgaccgcacggccaagaaggagcccgacaaggtcaaaccggtcattcccggggagaattgtttcccgacgctcgatcagttggtggatcgggtgatcaaggttgttgagcaacacacgaagaacaagagccgggggattcgctcatgaccgaagcatccaatactgtcctcttgcgccttgaaggcccgctccaggcctggggcgatccctccaagtttgttattcggcgcaccatggaggcacccaccaagtccggtataatcggtctcatctgctgcgccaagggactgagccggaaagaggcgcgtcacgaactgccggatttgaaccgcttggcgatgggagtgcgcattgaccggccaggcacgcggtggtgggactaccacaccgtgggtgcccatgttggcttgctcacggccgacggaaagatcaagaggacggccagcaccaagcagatcgaaacgctcgtcagcagacgcgagtatttgtgtgatgcgagttttctcgcggtgctgcaaggggacccggagatcattggccgtgttcaaatcgccctggagaaccccagatggccggtctatctggggcggaagtcctgtccaccgtccagaccggtgtttgccggggtctccacaaacgaagatctgccgtcggcactgcggctacaaccttgggccccccgcgacaggagggataccccaccggcggacggaacccttctatgtttcgtcgagtggcgaccctcggccgaggcgcccctgattcccgacgattcggaagtttggtacgacactcccatctcattcgacccgccggtccacgatccgcgcgtggtacgccgatggctcgtcggcgtggaaaggggtgccgctctccaacggcccctgccccctcggccgcggctgcgcgccgactatggaaattccgaataccaagcgcgccgtgaccaacgcctggaagcagacaggcacctctgcgtcttctgcaagtccccggcaacgaccgtgcagcacgtcacgtatcggcgggcaggcggcgacgaaagccaggatgatctgcgaaccctctgccgatactgccacgacgccgtgaccatgatcgaatacgggcatgggatgggcctggaccgcatcaacccggaagagccacgttggcgcgagccgattttggaaaagcggcgggagattattcacttccgctcccttgagacgcgccgtaggcacctggcaaccgatgatggccttacccaggaggaggtggaatagccatgtacctgtcctgcctgctggtcaattccggacaaaatccagaccgcccgagacccggtcgagcgtggcttagaaacttgtacctggttcaccagcggctctggatggcctttccatcccccgccaagaaactggacgatccggattttctcaagccgtacgacccgtgcgatttcgcaagagcgagcggcaacgaggaatctgccgtgcgggaaagctttttgttccggcttgatccccagcccggcagccgcgtggtcattctggcgcagtcgaagaccgagcctgactgggactatgcattttgcaatgcagaccatctgttggcgtgccgcccagaagtgaagccgttcgagcctgcgtttgaaaaagactcgattctccgcttccgcattagggtcaaccccgtgcgctcgcgggtgcgggagaaagcccagcgcgggaggcggcatgacgtggtgatgaatgccaagaagcagctgcaagagaacccgggagcggaggcgccggacaacctcgtgcggacggaggggctggcttggctgaaggcgcgcgccgaacggcacggcttccgggtccgggacgacgacgtgcgggtgtccggctatcggcagcagcgcctgctcaagcccgggcggcagggccgcgcgggcgaccgcgaggagcgccagattcgcttcagtacgctggactatgacggcctcctgaccgtcgccgacgcgcctctgttcctggcgaccctgaaacagggcatcggctcggccaagggcttcgggtgcggcctgctgctcgtgcggagggtgtagccatgctgccaccgctcaagccgatccagatcaaggagcgtctgtccgtgctgttcctggagtatgggcaactggacgttctggacggggcgttcgtgttggtggacaaggagggcgcgcgcacccacattcccgtgggcagcgtggcctgcctcatgctggagccgggcacccgggtttcccatgccgccgtggtgttggcagcccgggtggggtgcctgctgacctgggtgggcgaggcgggagtccggctctacgcggccggccagcccggcggcgcccgctcggatcgtctgctctaccaggcccagcttgcgctcgaccccgcggcgcggctgcgcgtcgtgcgcaagatgtacgccctgcgcttcggcgaggagccgcccgccaagcgcagcatcgagcaattgcgcggcatcgagggcgcccgcgtgaggcgcatgtaccagctcctggctgacaagttccgcgtgccgtggaagacccgcaactacgacccgacggactgggggagcggcgacctgccgaaccggtgcctgagctccgcgacggcctgcctctacgggattaccgaagcggcggtgttggcggccggctacgcgccggccatcggattcatccataccgggaagcccctgtcgttcgtctacgacatcgcggacctgttcaagttcgatacggtcgttccggccgcattccggatcgcggccacgaacccccgcgatcccgagcgcgacgtgcgactggcgtgccgggatgcgttccggcagacccgcctgttggacatcattattcccacgatcgaggacgtgttggccgccggagagcttccggtgccgaaaccgccggaggacggggtggggccggcgattcccaatccggagggcatcggcgatgctggtcatcgtggttgaaaacgtaccgccccgcctgaggggccgtctggccgtgtggttgctggagttgcgagccggggtctatgtcggcgacgtctcccggcgggtgcgcgagatggtgtggcaacaggtcgggtccggaatcggcggaggcaatgccgtgatggcgtggacggccaacaacgagcaggggtttgcctttgaaacggccggtgagaatcggcgcgtgccgaggctgatggatggagtgacgctggtcaaatttcttccacccgccgccacccctgctgaagcccgggaggatgccgtggagaccgatccgcatgaagcttgacctcagacgctgtcggggaggcttcccggctgcccgtgcaagccctccggccggggcgcatggcacgtacctttggccggtagacggactgtgcatctccagcagaatgatgtaattggagatccaggaagtgtgttccccgcgtgtgcggggatgaaccggggcgtggagccctgtaccagatataactatagtgttccccgcgtgtgcggggatgaaccggtcgagcctgacgacgacgttgcccatgaggagtgttccccgcgtgtgcggggatgaaccggccgcgcacagcaagccaatcaccatgatggcgtgttccccgcgtgtgcggggatgaaccgaacatagggttgacctggatggacgggatgttgtgttccccgcgtgtgcggggatgaaccgaaatggcactggacgaatcccacaaggtctgcgtgttccccgcgtgtgcggggatgaaccgccgcagggcaccttcgcgcagatcacgaccgcgtgttccccgcgtgtgcggggatgaaccgtggatgagacaaccccgcgcgggtatttccttgtgttccccgcgtgtgcggggatgaaccggagcgctggccgtgctggcacgtcacgctggtgtgttccccgcgtgtgcggggatgaaccgcactgcgccgcgcgatattggatcgagtcgcggccatccaacagatactccaggccaaacctcaccttgacgccaaggctccatgaccccagccgaactcaaatccgcccgcgc

SEQ ID NO: 1032 - DNA, 103232 bp, Artificial Sequence
  Synthetic Oligonucleotide
  misc_feature (1)..(92871): n is a, c, g, or t
nnnnnnnnnnnnnnnnnnnnnnnnnnnnnnnnnnnnnnnnnnnnnnnnnnnnnnnnnnnnnnnnnnnnnnnnnnnnnnnnnnnnnnnnnnnnnnnnnnnnnnnnnnnnnnnnnnnnnnnnnnnnnnnnnnnnnnnnnnnnnnnnnnnnnnnnnnnnnnnnnnnnnnnnnnnnnnnnnnnnnnnnnnnnnnnnnnnnnnnnnnnnnnnnnnnnnnnnnnnnnnnnnnnnnnnnnnnnnnnnnnnnnnnnnnnnnnnnnnnnnnnnnnnnnnnnnnnnnnnnnnnnnnnnnnnnnnnnnnnnnnnnnnnnnnnnnnnnnnnnnnnnnnnnnnnnnnnnnnnnnnnnnnnnnnnnnnnnnnnnnnnnnnnnnnnnnnnnnnnnnnnnnnnnnnnnnnnnnnnnnnnnnnnnnnnnnnnnnnnnnnnnnnnnnnnnnnnnnnnnnnnnnnnnnnnnnnnnnnnnnnnnnnnnnnnnnnnnnnnnnnnnnnnnnnnnnnnnnnnnnnnnnnnnnnnnnnnnnnnnnnnnnnnnnnnnnnnnnnnnnnnnnnnnnnnnnnnnnnnnnnnnnnnnnnnnnnnnnnnnnnnnnnnnnnnnnnnnnnnnnnnnnnnnnnnnnnnnnnnnnnnnnnnnnnnnnnnnnnnnnnnnnnnnnnnnnnnnnnnnnnnnnnnnnnnnnnnnnnnnnnnnnnnnnnnnnnnnnnnnnnnnnnnnnnnnnnnnnnnnnnnnnnnnnnnnnnnnnnnnnnnnnnnnnnnnnnnnnnnnnnnnnnnnnnnnnnnnnnnnnnnnnnnnnnnnnnnnnnnnnnnnnnnnnnnnnnnnnnnnnnnnnnnnnnnnnnnnnnnnnnnnnnnnnnnnnnnnnnnnnnnnnnnnnnnnnnnnnnnnnnnnnnnnnnnnnnnnnnnnnnnnnnnnnnnnnnnnnnnnnnnnnnnnnnnnnnnnnnnnnnnnnnnnnnnnnnnnnnnnnnnnnnnnnnnnnnnnnnnnnnnnnnnnnnnnnnnnnnnnnnnnnnnnnnnnnnnnnnnnnnnnnnnnnnnnnnnnnnnnnnnnnnnnnnnnnnnnnnnnnnnnnnnnnnnnnnnnnnnnnnnnnnnnnnnnnnnnnnnnnnnnnnnnnnnnnnnnnnnnnnnnnnnnnnnnnnnnnnnnnnnnnnnnnnnnnnnnnnnnnnnnnnnnnnnnnnnnnnnnnnnnnnnnnnnnnnnnnnnnnnnnnnnnnnnnnnnnnnnnnnnnnnnnnnnnnnnnnnnnnnnnnnnnnnnnnnnnnnnnnnnnnnnnnnnnnnnnnnnnnnnnnnnnnnnnnnnnnnnnnnnnnnnnnnnnnnnnnnnnnnnnnnnnnnnnnnnnnnnnnnnnnnnnnnnnnnnnnnnnnnnnnnnnnnnnnnnnnnnnnnnnnnnnnnnnnnnnnnnnnnnnnnnnnnnnnnnnnnnnnnnnnnnnnnnnnnnnnnnnnnnnnnnnnnnnnnnnnnnnnnnnnnnnnnnnnnnnnnnnnnnnnnnnnnnnnnnnnnnnnnnnnnnnnnnnnnnnnnnnnnnnnnnnnnnnnnnnnnnnnnnnnnnnnnnnnnnnnnnnnnnnnnnnnnnnnnnnnnnnnnnnnnnnnnnnnnnnnnnnnnnnnnnnnnnnnnnnnnnnnnnnnnnnnnnnnnnnnnnnnnnnnnnnnnnnnnnnnnnnnnnnnnnnnnnnnnnnnnnnnnnnnnnnnnnnnnnnnnnnnnnnnnnnnnnnnnnnnnnnnnnnnnnnnnnnnnnnnnnnnnnnnnnnnnnnnnnnnnnnnnnnnnnnnnnnnnnnnnnnnnnnnnnnnnnnnnnnnnnnnnnnnnnnnnnnnnnnnnnnnnnnnnnnnnnnnnnnnnnnnnnnnnnnnnnnnnnnnnnnnnnnnnnnnnnnnnnnnnnnnnnnnnnnnnnnnnnnnnnnnnnnnnnnnnnnnnnnnnnnnnnnnnnnnnnnnnnnnnnnnnnnnnnnnnnnnnnnnnnnnnnnnnnnnnnnnnnnnnnnnnnnnnnnnnnnnnnnnnnnnnnnnnnnnnnnnnnnnnnnnnnnnnnnnnnnnnnnnnnnnnnnnnnnnnnnnnnnnnnnnnnnnnnnnnnnnnnnnnnnnnnnnnnnnnnnnnnnnnnnnnnnnnnnnnnnnnnnnnnnnnnnnnnnnnnnnnnnnnnnnnnnnnnnnnnnnnnnnnnnnnnnnnnnnnnnnnnnnnnnnnnnnnnnnnnnnnnnnnnnnnnnnnnnnnnnnnnnnnnnnnnnnnnnnnnnnnnnnnnnnnnnnnnnnnnnnnnnnnnnnnnnnnnnnnnnnnnnnnnnnnnnnnnnnnnnnnnnnnnnnnnnnnnnnnnnnnnnnnnnnnnnnnnnnnnnnnnnnnnnnnnnnnnnnnnnnnnnnnnnnnnnnnnnnnnnnnnnnnnnnnnnnnnnnnnnnnnnnnnnnnnnnnnnnnnnnnnnnnnnnnnnnnnnnnnnnnnnnnnnnnnnnnnnnnnnnnnnnnnnnnnnnnnnnnnnnnnnnnnnnnnnnnnnnnnnnnnnnnnnnnnnnnnnnnnnnnnnnnnnnnnnnnnnnnnnnnnnnnnnnnnnnnnnnnnnnnnnnnnnnnnnnnnnnnnnnnnnnnnnnnnnnnnnnnnnnnnnnnnnnnnnnnnnnnnnnnnnnnnnnnnnnnnnnnnnnnnnnnnnnnnnnnnnnnnnnnnnnnnnnnnnnnnnnnnnnnnnnnnnnnnnnnnnnnnnnnnnnnnnnnnnnnnnnnnnnnnnnnnnnnnnnnnnnnnnnnnnnnnnnnnnnnnnnnnnnnnnnnnnnnnnnnnnnnnnnnnnnnnnnnnnnnnnnnnnnnnnnnnnnnnnnnnnnnnnnnnnnnnnnnnnnnnnnnnnnnnnnnnnnnnnnnnnnnnnnnnnnnnnnnnnnnnnnnnnnnnnnnnnnnnnnnnnnnnnnnnnnnnnnnnnnnnnnnnnnnnnnnnnnnnnnnnnnnnnnnnnnnnnnnnnnnnnnnnnnnnnnnnnnnnnnnnnnnnnnnnnnnnnnnnnnnnnnnnnnnnnnnnnnnnnnnnnnnnnnnnnnnnnnnnnnnnnnnnnnnnnnnnnnnnnnnnnnnnnnnnnnnnnnnnnnnnnnnnnnnnnnnnnnnnnnnnnnnnnnnnnnnnnnnnnnnnnnnnnnnnnnnnnnnnnnnnnnnnnnnnnnnnnnnnnnnnnnnnnnnnnnnnnnnnnnnnnnnnnnnnnnnnnnnnnnnnnnnnnnnnnnnnnnnnnnnnnnnnnnnnnnnnnnnnnnnnnnnnnnnnnnnnnnnnnnnnnnnnnnnnnnnnnnnnnnnnnnnnnnnnnnnnnnnnnnnnnnnnnnnnnnnnnnnnnnnnnnnnnnnnnnnnnnnnnnnnnnnnnnnnnnnnnnnnnnnnnnnnnnnnnnnnnnnnnnnnnnnnnnnnnnnnnnnnnnnnnnnnnnnnnnnnnnnnnnnnnnnnnnnnnnnnnnnnnnnnnnnnnnnnnnnnnnnnnnnnnnnnnnnnnnnnnnnnnnnnnnnnnnnnnnnnnnnnnnnnnnnnnnnnnnnnnnnnnnnnnnnnnnnnnnnnnnnnnnnnnnnnnnnnnnnnnnnnnnnnnnnnnnnnnnnnnnnnnnnnnnnnnnnnnnnnnnnnnnnnnnnnnnnnnnnnnnnnnnnnnnnnnnnnnnnnnnnnnnnnnnnnnnnnnnnnnnnnnnnnnnnnnnnnnnnnnnnnnnnnnnnnnnnnnnnnnnnnnnnnnnnnnnnnnnnnnnnnnnnnnnnnnnnnnnnnnnnnnnnnnnnnnnnnnnnnnnnnnnnnnnnnnnnnnnnnnnnnnnnnnnnnnnnnnnnnnnnnnnnnnnnnnnnnnnnnnnnnnnnnnnnnnnnnnnnnnnnnnnnnnnnnnnnnnnnnnnnnnnnnnnnnnnnnnnnnnnnnnnnnnnnnnnnnnnnnnnnnnnnnnnnnnnnnnnnnnnnnnnnnnnnnnnnnnnnnnnnnnnnnnnnnnnnnnnnnnnnnnnnnnnnnnnnnnnnnnnnnnnnnnnnnnnnnnnnnnnnnnnnnnnnnnnnnnnnnnnnnnnnnnnnnnnnnnnnnnnnnnnnnnnnnnnnnnnnnnnnnnnnnnnnnnnnnnnnnnnnnnnnnnnnnnnnnnnnnnnnnnnnnnnnnnnnnnnnnnnnnnnnnnnnnnnnnnnnnnnnnnnnnnnnnnnnnnnnnnnnnnnnnnnnnnnnnnnnnnnnnnnnnnnnnnnnnnnnnnnnnnnnnnnnnnnnnnnnnnnnnnnnnnnnnnnnnnnnnnnnnnnnnnnnnnnnnnnnnnnnnnnnnnnnnnnnnnnnnnnnnnnnnnnnnnnnnnnnnnnnnnnnnnnnnnnnnnnnnnnnnnnnnnnnnnnnnnnnnnnnnnnnnnnnnnnnnnnnnnnnnnnnnnnnnnnnnnnnnnnnnnnnnnnnnnnnnnnnnnnnnnnnnnnnnnnnnnnnnnnnnnnnnnnnnnnnnnnnnnnnnnnnnnnnnnnnnnnnnnnnnnnnnnnnnnnnnnnnnnnnnnnnnnnnnnnnnnnnnnnnnnnnnnnnnnnnnnnnnnnnnnnnnnnnnnnnnnnnnnnnnnnnnnnnnnnnnnnnnnnnnnnnnnnnnnnnnnnnnnnnnnnnnnnnnnnnnnnnnnnnnnnnnnnnnnnnnnnnnnnnnnnnnnnnnnnnnnnnnnnnnnnnnnnnnnnnnnnnnnnnnnnnnnnnnnnnnnnnnnnnnnnnnnnnnnnnnnnnnnnnnnnnnnnnnnnnnnnnnnnnnnnnnnnnnnnnnnnnnnnnnnnnnnnnnnnnnnnnnnnnnnnnnnnnnnnnnnnnnnnnnnnnnnnnnnnnnnnnnnnnnnnnnnnnnnnnnnnnnnnnnnnnnnnnnnnnnnnnnnnnnnnnnnnnnnnnnnnnnnnnnnnnnnnnnnnnnnnnnnnnnnnnnnnnnnnnnnnnnnnnnnnnnnnnnnnnnnnnnnnnnnnnnnnnnnnnnnnnnnnnnnnnnnnnnnnnnnnnnnnnnnnnnnnnnnnnnnnnnnnnnnnnnnnnnnnnnnnnnnnnnnnnnnnnnnnnnnnnnnnnnnnnnnnnnnnnnnnnnnnnnnnnnnnnnnnnnnnnnnnnnnnnnnnnnnnnnnnnnnnnnnnnnnnnnnnnnnnnnnnnnnnnnnnnnnnnnnnnnnnnnnnnnnnnnnnnnnnnnnnnnnnnnnnnnnnnnnnnnnnnnnnnnnnnnnnnnnnnnnnnnnnnnnnnnnnnnnnnnnnnnnnnnnnnnnnnnnnnnnnnnnnnnnnnnnnnnnnnnnnnnnnnnnnnnnnnnnnnnnnnnnnnnnnnnnnnnnnnnnnnnnnnnnnnnnnnnnnnnnnnnnnnnnnnnnnnnnnnnnnnnnnnnnnnnnnnnnnnnnnnnnnnnnnnnnnnnnnnnnnnnnnnnnnnnnnnnnnnnnnnnnnnnnnnnnnnnnnnnnnnnnnnnnnnnnnnnnnnnnnnnnnnnnnnnnnnnnnnnnnnnnnnnnnnnnnnnnnnnnnnnnnnnnnnnnnnnnnnnnnnnnnnnnnnnnnnnnnnnnnnnnnnnnnnnnnnnnnnnnnnnnnnnnnnnnnnnnnnnnnnnnnnnnnnnnnnnnnnnnnnnnnnnnnnnnnnnnnnnnnnnnnnnnnnnnnnnnnnnnnnnnnnnnnnnnnnnnnnnnnnnnnnnnnnnnnnnnnnnnnnnnnnnnnnnnnnnnnnnnnnnnnnnnnnnnnnnnnnnnnnnnnnnnnnnnnnnnnnnnnnnnnnnnnnnnnnnnnnnnnnnnnnnnnnnnnnnnnnnnnnnnnnnnnnnnnnnnnnnnnnnnnnnnnnnnnnnnnnnnnnnnnnnnnnnnnnnnnnnnnnnnnnnnnnnnnnnnnnnnnnnnnnnnnnnnnnnnnnnnnnnnnnnnnnnnnnnnnnnnnnnnnnnnnnnnnnnnnnnnnnnnnnnnnnnnnnnnnnnnnnnnnnnnnnnnnnnnnnnnnnnnnnnnnnnnnnnnnnnnnnnnnnnnnnnnnnnnnnnnnnnnnnnnnnnnnnnnnnnnnnnnnnnnnnnnnnnnnnnnnnnnnnnnnnnnnnnnnnnnnnnnnnnnnnnnnnnnnnnnnnnnnnnnnnnnnnnnnnnnnnnnnnnnnnnnnnnnnnnnnnnnnnnnnnnnnnnnnnnnnnnnnnnnnnnnnnnnnnnnnnnnnnnnnnnnnnnnnnnnnnnnnnnnnnnnnnnnnnnnnnnnnnnnnnnnnnnnnnnnnnnnnnnnnnnnnnnnnnnnnnnnnnnnnnnnnnnnnnnnnnnnnnnnnnnnnnnnnnnnnnnnnnnnnnnnnnnnnnnnnnnnnnnnnnnnnnnnnnnnnnnnnnnnnnnnnnnnnnnnnnnnnnnnnnnnnnnnnnnnnnnnnnnnnnnnnnnnnnnnnnnnnnnnnnnnnnnnnnnnnnnnnnnnnnnnnnnnnnnnnnnnnnnnnnnnnnnnnnnnnnnnnnnnnnnnnnnnnnnnnnnnnnnnnnnnnnnnnnnnnnnnnnnnnnnnnnnnnnnnnnnnnnnnnnnnnnnnnnnnnnnnnnnnnnnnnnnnnnnnnnnnnnnnnnnnnnnnnnnnnnnnnnnnnnnnnnnnnnnnnnnnnnnnnnnnnnnnnnnnnnnnnnnnnnnnnnnnnnnnnnnnnnnnnnnnnnnnnnnnnnnnnnnnnnnnnnnnnnnnnnnnnnnnnnnnnnnnnnnnnnnnnnnnnnnnnnnnnnnnnnnnnnnnnnnnnnnnnnnnnnnnnnnnnnnnnnnnnnnnnnnnnnnnnnnnnnnnnnnnnnnnnnnnnnnnnnnnnnnnnnnnnnnnnnnnnnnnnnnnnnnnnnnnnnnnnnnnnnnnnnnnnnnnnnnnnnnnnnnnnnnnnnnnnnnnnnnnnnnnnnnnnnnnnnnnnnnnnnnnnnnnnnnnnnnnnnnnnnnnnnnnnnnnnnnnnnnnnnnnnnnnnnnnnnnnnnnnnnnnnnnnnnnnnnnnnnnnnnnnnnnnnnnnnnnnnnnnnnnnnnnnnnnnnnnnnnnnnnnnnnnnnnnnnnnnnnnnnnnnnnnnnnnnnnnnnnnnnnnnnnnnnnnnnnnnnnnnnnnnnnnnnnnnnnnnnnnnnnnnnnnnnnnnnnnnnnnnnnnnnnnnnnnnnnnnnnnnnnnnnnnnnnnnnnnnnnnnnnnnnnnnnnnnnnnnnnnnnnnnnnnnnnnnnnnnnnnnnnnnnnnnnnnnnnnnnnnnnnnnnnnnnnnnnnnnnnnnnnnnnnnnnnnnnnnnnnnnnnnnnnnnnnnnnnnnnnnnnnnnnnnnnnnnnnnnnnnnnnnnnnnnnnnnnnnnnnnnnnnnnnnnnnnnnnnnnnnnnnnnnnnnnnnnnnnnnnnnnnnnnnnnnnnnnnnnnnnnnnnnnnnnnnnnnnnnnnnnnnnnnnnnnnnnnnnnnnnnnnnnnnnnnnnnnnnnnnnnnnnnnnnnnnnnnnnnnnnnnnnnnnnnnnnnnnnnnnnnnnnnnnnnnnnnnnnnnnnnnnnnnnnnnnnnnnnnnnnnnnnnnnnnnnnnnnnnnnnnnnnnnnnnnnnnnnnnnnnnnnnnnnnnnnnnnnnnnnnnnnnnnnnnnnnnnnnnnnnnnnnnnnnnnnnnnnnnnnnnnnnnnnnnnnnnnnnnnnnnnnnnnnnnnnnnnnnnnnnnnnnnnnnnnnnnnnnnnnnnnnnnnnnnnnnnnnnnnnnnnnnnnnnnnnnnnnnnnnnnnnnnnnnnnnnnnnnnnnnnnnnnnnnnnnnnnnnnnnnnnnnnnnnnnnnnnnnnnnnnnnnnnnnnnnnnnnnnnnnnnnnnnnnnnnnnnnnnnnnnnnnnnnnnnnnnnnnnnnnnnnnnnnnnnnnnnnnnnnnnnnnnnnnnnnnnnnnnnnnnnnnnnnnnnnnnnnnnnnnnnnnnnnnnnnnnnnnnnnnnnnnnnnnnnnnnnnnnnnnnnnnnnnnnnnnnnnnnnnnnnnnnnnnnnnnnnnnnnnnnnnnnnnnnnnnnnnnnnnnnnnnnnnnnnnnnnnnnnnnnnnnnnnnnnnnnnnnnnnnnnnnnnnnnnnnnnnnnnnnnnnnnnnnnnnnnnnnnnnnnnnnnnnnnnnnnnnnnnnnnnnnnnnnnnnnnnnnnnnnnnnnnnnnnnnnnnnnnnnnnnnnnnnnnnnnnnnnnnnnnnnnnnnnnnnnnnnnnnnnnnnnnnnnnnnnnnnnnnnnnnnnnnnnnnnnnnnnnnnnnnnnnnnnnnnnnnnnnnnnnnnnnnnnnnnnnnnnnnnnnnnnnnnnnnnnnnnnnnnnnnnnnnnnnnnnnnnnnnnnnnnnnnnnnnnnnnnnnnnnnnnnnnnnnnnnnnnnnnnnnnnnnnnnnnnnnnnnnnnnnnnnnnnnnnnnnnnnnnnnnnnnnnnnnnnnnnnnnnnnnnnnnnnnnnnnnnnnnnnnnnnnnnnnnnnnnnnnnnnnnnnnnnnnnnnnnnnnnnnnnnnnnnnnnnnnnnnnnnnnnnnnnnnnnnnnnnnnnnnnnnnnnnnnnnnnnnnnnnnnnnnnnnnnnnnnnnnnnnnnnnnnnnnnnnnnnnnnnnnnnnnnnnnnnnnnnnnnnnnnnnnnnnnnnnnnnnnnnnnnnnnnnnnnnnnnnnnnnnnnnnnnnnnnnnnnnnnnnnnnnnnnnnnnnnnnnnnnnnnnnnnnnnnnnnnnnnnnnnnnnnnnnnnnnnnnnnnnnnnnnnnnnnnnnnnnnnnnnnnnnnnnnnnnnnnnnnnnnnnnnnnnnnnnnnnnnnnnnnnnnnnnnnnnnnnnnnnnnnnnnnnnnnnnnnnnnnnnnnnnnnnnnnnnnnnnnnnnnnnnnnnnnnnnnnnnnnnnnnnnnnnnnnnnnnnnnnnnnnnnnnnnnnnnnnnnnnnnnnnnnnnnnnnnnnnnnnnnnnnnnnnnnnnnnnnnnnnnnnnnnnnnnnnnnnnnnnnnnnnnnnnnnnnnnnnnnnnnnnnnnnnnnnnnnnnnnnnnnnnnnnnnnnnnnnnnnnnnnnnnnnnnnnnnnnnnnnnnnnnnnnnnnnnnnnnnnnnnnnnnnnnnnnnnnnnnnnnnnnnnnnnnnnnnnnnnnnnnnnnnnnnnnnnnnnnnnnnnnnnnnnnnnnnnnnnnnnnnnnnnnnnnnnnnnnnnnnnnnnnnnnnnnnnnnnnnnnnnnnnnnnnnnnnnnnnnnnnnnnnnnnnnnnnnnnnnnnnnnnnnnnnnnnnnnnnnnnnnnnnnnnnnnnnnnnnnnnnnnnnnnnnnnnnnnnnnnnnnnnnnnnnnnnnnnnnnnnnnnnnnnnnnnnnnnnnnnnnnnnnnnnnnnnnnnnnnnnnnnnnnnnnnnnnnnnnnnnnnnnnnnnnnnnnnnnnnnnnnnnnnnnnnnnnnnnnnnnnnnnnnnnnnnnnnnnnnnnnnnnnnnnnnnnnnnnnnnnnnnnnnnnnnnnnnnnnnnnnnnnnnnnnnnnnnnnnnnnnnnnnnnnnnnnnnnnnnnnnnnnnnnnnnnnnnnnnnnnnnnnnnnnnnnnnnnnnnnnnnnnnnnnnnnnnnnnnnnnnnnnnnnnnnnnnnnnnnnnnnnnnnnnnnnnnnnnnnnnnnnnnnnnnnnnnnnnnnnnnnnnnnnnnnnnnnnnnnnnnnnnnnnnnnnnnnnnnnnnnnnnnnnnnnnnnnnnnnnnnnnnnnnnnnnnnnnnnnnnnnnnnnnnnnnnnnnnnnnnnnnnnnnnnnnnnnnnnnnnnnnnnnnnnnnnnnnnnnnnnnnnnnnnnnnnnnnnnnnnnnnnnnnnnnnnnnnnnnnnnnnnnnnnnnnnnnnnnnnnnnnnnnnnnnnnnnnnnnnnnnnnnnnnnnnnnnnnnnnnnnnnnnnnnnnnnnnnnnnnnnnnnnnnnnnnnnnnnnnnnnnnnnnnnnnnnnnnnnnnnnnnnnnnnnnnnnnnnnnnnnnnnnnnnnnnnnnnnnnnnnnnnnnnnnnnnnnnnnnnnnnnnnnnnnnnnnnnnnnnnnnnnnnnnnnnnnnnnnnnnnnnnnnnnnnnnnnnnnnnnnnnnnnnnnnnnnnnnnnnnnnnnnnnnnnnnnnnnnnnnnnnnnnnnnnnnnnnnnnnnnnnnnnnnnnnnnnnnnnnnnnnnnnnnnnnnnnnnnnnnnnnnnnnnnnnnnnnnnnnnnnnnnnnnnnnnnnnnnnnnnnnnnnnnnnnnnnnnnnnnnnnnnnnnnnnnnnnnnnnnnnnnnnnnnnnnnnnnnnnnnnnnnnnnnnnnnnnnnnnnnnnnnnnnnnnnnnnnnnnnnnnnnnnnnnnnnnnnnnnnnnnnnnnnnnnnnnnnnnnnnnnnnnnnnnnnnnnnnnnnnnnnnnnnnnnnnnnnnnnnnnnnnnnnnnnnnnnnnnnnnnnnnnnnnnnnnnnnnnnnnnnnnnnnnnnnnnnnnnnnnnnnnnnnnnnnnnnnnnnnnnnnnnnnnnnnnnnnnnnnnnnnnnnnnnnnnnnnnnnnnnnnnnnnnnnnnnnnnnnnnnnnnnnnnnnnnnnnnnnnnnnnnnnnnnnnnnnnnnnnnnnnnnnnnnnnnnnnnnnnnnnnnnnnnnnnnnnnnnnnnnnnnnnnnnnnnnnnnnnnnnnnnnnnnnnnnnnnnnnnnnnnnnnnnnnnnnnnnnnnnnnnnnnnnnnnnnnnnnnnnnnnnnnnnnnnnnnnnnnnnnnnnnnnnnnnnnnnnnnnnnnnnnnnnnnnnnnnnnnnnnnnnnnnnnnnnnnnnnnnnnnnnnnnnnnnnnnnnnnnnnnnnnnnnnnnnnnnnnnnnnnnnnnnnnnnnnnnnnnnnnnnnnnnnnnnnnnnnnnnnnnnnnnnnnnnnnnnnnnnnnnnnnnnnnnnnnnnnnnnnnnnnnnnnnnnnnnnnnnnnnnnnnnnnnnnnnnnnnnnnnnnnnnnnnnnnnnnnnnnnnnnnnnnnnnnnnnnnnnnnnnnnnnnnnnnnnnnnnnnnnnnnnnnnnnnnnnnnnnnnnnnnnnnnnnnnnnnnnnnnnnnnnnnnnnnnnnnnnnnnnnnnnnnnnnnnnnnnnnnnnnnnnnnnnnnnnnnnnnnnnnnnnnnnnnnnnnnnnnnnnnnnnnnnnnnnnnnnnnnnnnnnnnnnnnnnnnnnnnnnnnnnnnnnnnnnnnnnnnnnnnnnnnnnnnnnnnnnnnnnnnnnnnnnnnnnnnnnnnnnnnnnnnnnnnnnnnnnnnnnnnnnnnnnnnnnnnnnnnnnnnnnnnnnnnnnnnnnnnnnnnnnnnnnnnnnnnnnnnnnnnnnnnnnnnnnnnnnnnnnnnnnnnnnnnnnnnnnnnnnnnnnnnnnnnnnnnnnnnnnnnnnnnnnnnnnnnnnnnnnnnnnnnnnnnnnnnnnnnnnnnnnnnnnnnnnnnnnnnnnnnnnnnnnnnnnnnnnnnnnnnnnnnnnnnnnnnnnnnnnnnnnnnnnnnnnnnnnnnnnnnnnnnnnnnnnnnnnnnnnnnnnnnnnnnnnnnnnnnnnnnnnnnnnnnnnnnnnnnnnnnnnnnnnnnnnnnnnnnnnnnnnnnnnnnnnnnnnnnnnnnnnnnnnnnnnnnnnnnnnnnnnnnnnnnnnnnnnnnnnnnnnnnnnnnnnnnnnnnnnnnnnnnnnnnnnnnnnnnnnnnnnnnnnnnnnnnnnnnnnnnnnnnnnnnnnnnnnnnnnnnnnnnnnnnnnnnnnnnnnnnnnnnnnnnnnnnnnnnnnnnnnnnnnnnnnnnnnnnnnnnnnnnnnnnnnnnnnnnnnnnnnnnnnnnnnnnnnnnnnnnnnnnnnnnnnnnnnnnnnnnnnnnnnnnnnnnnnnnnnnnnnnnnnnnnnnnnnnnnnnnnnnnnnnnnnnnnnnnnnnnnnnnnnnnnnnnnnnnnnnnnnnnnnnnnnnnnnnnnnnnnnnnnnnnnnnnnnnnnnnnnnnnnnnnnnnnnnnnnnnnnnnnnnnnnnnnnnnnnnnnnnnnnnnnnnnnnnnnnnnnnnnnnnnnnnnnnnnnnnnnnnnnnnnnnnnnnnnnnnnnnnnnnnnnnnnnnnnnnnnnnnnnnnnnnnnnnnnnnnnnnnnnnnnnnnnnnnnnnnnnnnnnnnnnnnnnnnnnnnnnnnnnnnnnnnnnnnnnnnnnnnnnnnnnnnnnnnnnnnnnnnnnnnnnnnnnnnnnnnnnnnnnnnnnnnnnnnnnnnnnnnnnnnnnnnnnnnnnnnnnnnnnnnnnnnnnnnnnnnnnnnnnnnnnnnnnnnnnnnnnnnnnnnnnnnnnnnnnnnnnnnnnnnnnnnnnnnnnnnnnnnnnnnnnnnnnnnnnnnnnnnnnnnnnnnnnnnnnnnnnnnnnnnnnnnnnnnnnnnnnnnnnnnnnnnnnnnnnnnnnnnnnnnnnnnnnnnnnnnnnnnnnnnnnnnnnnnnnnnnnnnnnnnnnnnnnnnnnnnnnnnnnnnnnnnnnnnnnnnnnnnnnnnnnnnnnnnnnnnnnnnnnnnnnnnnnnnnnnnnnnnnnnnnnnnnnnnnnnnnnnnnnnnnnnnnnnnnnnnnnnnnnnnnnnnnnnnnnnnnnnnnnnnnnnnnnnnnnnnnnnnnnnnnnnnnnnnnnnnnnnnnnnnnnnnnnnnnnnnnnnnnnnnnnnnnnnnnnnnnnnnnnnnnnnnnnnnnnnnnnnnnnnnnnnnnnnnnnnnnnnnnnnnnnnnnnnnnnnnnnnnnnnnnnnnnnnnnnnnnnnnnnnnnnnnnnnnnnnnnnnnnnnnnnnnnnnnnnnnnnnnnnnnnnnnnnnnnnnnnnnnnnnnnnnnnnnnnnnnnnnnnnnnnnnnnnnnnnnnnnnnnnnnnnnnnnnnnnnnnnnnnnnnnnnnnnnnnnnnnnnnnnnnnnnnnnnnnnnnnnnnnnnnnnnnnnnnnnnnnnnnnnnnnnnnnnnnnnnnnnnnnnnnnnnnnnnnnnnnnnnnnnnnnnnnnnnnnnnnnnnnnnnnnnnnnnnnnnnnnnnnnnnnnnnnnnnnnnnnnnnnnnnnnnnnnnnnnnnnnnnnnnnnnnnnnnnnnnnnnnnnnnnnnnnnnnnnnnnnnnnnnnnnnnnnnnnnnnnnnnnnnnnnnnnnnnnnnnnnnnnnnnnnnnnnnnnnnnnnnnnnnnnnnnnnnnnnnnnnnnnnnnnnnnnnnnnnnnnnnnnnnnnnnnnnnnnnnnnnnnnnnnnnnnnnnnnnnnnnnnnnnnnnnnnnnnnnnnnnnnnnnnnnnnnnnnnnnnnnnnnnnnnnnnnnnnnnnnnnnnnnnnnnnnnnnnnnnnnnnnnnnnnnnnnnnnnnnnnnnnnnnnnnnnnnnnnnnnnnnnnnnnnnnnnnnnnnnnnnnnnnnnnnnnnnnnnnnnnnnnnnnnnnnnnnnnnnnnnnnnnnnnnnnnnnnnnnnnnnnnnnnnnnnnnnnnnnnnnnnnnnnnnnnnnnnnnnnnnnnnnnnnnnnnnnnnnnnnnnnnnnnnnnnnnnnnnnnnnnnnnnnnnnnnnnnnnnnnnnnnnnnnnnnnnnnnnnnnnnnnnnnnnnnnnnnnnnnnnnnnnnnnnnnnnnnnnnnnnnnnnnnnnnnnnnnnnnnnnnnnnnnnnnnnnnnnnnnnnnnnnnnnnnnnnnnnnnnnnnnnnnnnnnnnnnnnnnnnnnnnnnnnnnnnnnnnnnnnnnnnnnnnnnnnnnnnnnnnnnnnnnnnnnnnnnnnnnnnnnnnnnnnnnnnnnnnnnnnnnnnnnnnnnnnnnnnnnnnnnnnnnnnnnnnnnnnnnnnnnnnnnnnnnnnnnnnnnnnnnnnnnnnnnnnnnnnnnnnnnnnnnnnnnnnnnnnnnnnnnnnnnnnnnnnnnnnnnnnnnnnnnnnnnnnnnnnnnnnnnnnnnnnnnnnnnnnnnnnnnnnnnnnnnnnnnnnnnnnnnnnnnnnnnnnnnnnnnnnnnnnnnnnnnnnnnnnnnnnnnnnnnnnnnnnnnnnnnnnnnnnnnnnnnnnnnnnnnnnnnnnnnnnnnnnnnnnnnnnnnnnnnnnnnnnnnnnnnnnnnnnnnnnnnnnnnnnnnnnnnnnnnnnnnnnnnnnnnnnnnnnnnnnnnnnnnnnnnnnnnnnnnnnnnnnnnnnnnnnnnnnnnnnnnnnnnnnnnnnnnnnnnnnnnnnnnnnnnnnnnnnnnnnnnnnnnnnnnnnnnnnnnnnnnnnnnnnnnnnnnnnnnnnnnnnnnnnnnnnnnnnnnnnnnnnnnnnnnnnnnnnnnnnnnnnnnnnnnnnnnnnnnnnnnnnnnnnnnnnnnnnnnnnnnnnnnnnnnnnnnnnnnnnnnnnnnnnnnnnnnnnnnnnnnnnnnnnnnnnnnnnnnnnnnnnnnnnnnnnnnnnnnnnnnnnnnnnnnnnnnnnnnnnnnnnnnnnnnnnnnnnnnnnnnnnnnnnnnnnnnnnnnnnnnnnnnnnnnnnnnnnnnnnnnnnnnnnnnnnnnnnnnnnnnnnnnnnnnnnnnnnnnnnnnnnnnnnnnnnnnnnnnnnnnnnnnnnnnnnnnnnnnnnnnnnnnnnnnnnnnnnnnnnnnnnnnnnnnnnnnnnnnnnnnnnnnnnnnnnnnnnnnnnnnnnnnnnnnnnnnnnnnnnnnnnnnnnnnnnnnnnnnnnnnnnnnnnnnnnnnnnnnnnnnnnnnnnnnnnnnnnnnnnnnnnnnnnnnnnnnnnnnnnnnnnnnnnnnnnnnnnnnnnnnnnnnnnnnnnnnnnnnnnnnnnnnnnnnnnnnnnnnnnnnnnnnnnnnnnnnnnnnnnnnnnnnnnnnnnnnnnnnnnnnnnnnnnnnnnnnnnnnnnnnnnnnnnnnnnnnnnnnnnnnnnnnnnnnnnnnnnnnnnnnnnnnnnnnnnnnnnnnnnnnnnnnnnnnnnnnnnnnnnnnnnnnnnnnnnnnnnnnnnnnnnnnnnnnnnnnnnnnnnnnnnnnnnnnnnnnnnnnnnnnnnnnnnnnnnnnnnnnnnnnnnnnnnnnnnnnnnnnnnnnnnnnnnnnnnnnnnnnnnnnnnnnnnnnnnnnnnnnnnnnnnnnnnnnnnnnnnnnnnnnnnnnnnnnnnnnnnnnnnnnnnnnnnnnnnnnnnnnnnnnnnnnnnnnnnnnnnnnnnnnnnnnnnnnnnnnnnnnnnnnnnnnnnnnnnnnnnnnnnnnnnnnnnnnnnnnnnnnnnnnnnnnnnnnnnnnnnnnnnnnnnnnnnnnnnnnnnnnnnnnnnnnnnnnnnnnnnnnnnnnnnnnnnnnnnnnnnnnnnnnnnnnnnnnnnnnnnnnnnnnnnnnnnnnnnnnnnnnnnnnnnnnnnnnnnnnnnnnnnnnnnnnnnnnnnnnnnnnnnnnnnnnnnnnnnnnnnnnnnnnnnnnnnnnnnnnnnnnnnnnnnnnnnnnnnnnnnnnnnnnnnnnnnnnnnnnnnnnnnnnnnnnnnnnnnnnnnnnnnnnnnnnnnnnnnnnnnnnnnnnnnnnnnnnnnnnnnnnnnnnnnnnnnnnnnnnnnnnnnnnnnnnnnnnnnnnnnnnnnnnnnnnnnnnnnnnnnnnnnnnnnnnnnnnnnnnnnnnnnnnnnnnnnnnnnnnnnnnnnnnnnnnnnnnnnnnnnnnnnnnnnnnnnnnnnnnnnnnnnnnnnnnnnnnnnnnnnnnnnnnnnnnnnnnnnnnnnnnnnnnnnnnnnnnnnnnnnnnnnnnnnnnnnnnnnnnnnnnnnnnnnnnnnnnnnnnnnnnnnnnnnnnnnnnnnnnnnnnnnnnnnnnnnnnnnnnnnnnnnnnnnnnnnnnnnnnnnnnnnnnnnnnnnnnnnnnnnnnnnnnnnnnnnnnnnnnnnnnnnnnnnnnnnnnnnnnnnnnnnnnnnnnnnnnnnnnnnnnnnnnnnnnnnnnnnnnnnnnnnnnnnnnnnnnnnnnnnnnnnnnnnnnnnnnnnnnnnnnnnnnnnnnnnnnnnnnnnnnnnnnnnnnnnnnnnnnnnnnnnnnnnnnnnnnnnnnnnnnnnnnnnnnnnnnnnnnnnnnnnnnnnnnnnnnnnnnnnnnnnnnnnnnnnnnnnnnnnnnnnnnnnnnnnnnnnnnnnnnnnnnnnnnnnnnnnnnnnnnnnnnnnnnnnnnnnnnnnnnnnnnnnnnnnnnnnnnnnnnnnnnnnnnnnnnnnnnnnnnnnnnnnnnnnnnnnnnnnnnnnnnnnnnnnnnnnnnnnnnnnnnnnnnnnnnnnnnnnnnnnnnnnnnnnnnnnnnnnnnnnnnnnnnnnnnnnnnnnnnnnnnnnnnnnnnnnnnnnnnnnnnnnnnnnnnnnnnnnnnnnnnnnnnnnnnnnnnnnnnnnnnnnnnnnnnnnnnnnnnnnnnnnnnnnnnnnnnnnnnnnnnnnnnnnnnnnnnnnnnnnnnnnnnnnnnnnnnnnnnnnnnnnnnnnnnnnnnnnnnnnnnnnnnnnnnnnnnnnnnnnnnnnnnnnnnnnnnnnnnnnnnnnnnnnnnnnnnnnnnnnnnnnnnnnnnnnnnnnnnnnnnnnnnnnnnnnnnnnnnnnnnnnnnnnnnnnnnnnnnnnnnnnnnnnnnnnnnnnnnnnnnnnnnnnnnnnnnnnnnnnnnnnnnnnnnnnnnnnnnnnnnnnnnnnnnnnnnnnnnnnnnnnnnnnnnnnnnnnnnnnnnnnnnnnnnnnnnnnnnnnnnnnnnnnnnnnnnnnnnnnnnnnnnnnnnnnnnnnnnnnnnnnnnnnnnnnnnnnnnnnnnnnnnnnnnnnnnnnnnnnnnnnnnnnnnnnnnnnnnnnnnnnnnnnnnnnnnnnnnnnnnnnnnnnnnnnnnnnnnnnnnnnnnnnnnnnnnnnnnnnnnnnnnnnnnnnnnnnnnnnnnnnnnnnnnnnnnnnnnnnnnnnnnnnnnnnnnnnnnnnnnnnnnnnnnnnnnnnnnnnnnnnnnnnnnnnnnnnnnnnnnnnnnnnnnnnnnnnnnnnnnnnnnnnnnnnnnnnnnnnnnnnnnnnnnnnnnnnnnnnnnnnnnnnnnnnnnnnnnnnnnnnnnnnnnnnnnnnnnnnnnnnnnnnnnnnnnnnnnnnnnnnnnnnnnnnnnnnnnnnnnnnnnnnnnnnnnnnnnnnnnnnnnnnnnnnnnnnnnnnnnnnnnnnnnnnnnnnnnnnnnnnnnnnnnnnnnnnnnnnnnnnnnnnnnnnnnnnnnnnnnnnnnnnnnnnnnnnnnnnnnnnnnnnnnnnnnnnnnnnnnnnnnnnnnnnnnnnnnnnnnnnnnnnnnnnnnnnnnnnnnnnnnnnnnnnnnnnnnnnnnnnnnnnnnnnnnnnnnnnnnnnnnnnnnnnnnnnnnnnnnnnnnnnnnnnnnnnnnnnnnnnnnnnnnnnnnnnnnnnnnnnnnnnnnnnnnnnnnnnnnnnnnnnnnnnnnnnnnnnnnnnnnnnnnnnnnnnnnnnnnnnnnnnnnnnnnnnnnnnnnnnnnnnnnnnnnnnnnnnnnnnnnnnnnnnnnnnnnnnnnnnnnnnnnnnnnnnnnnnnnnnnnnnnnnnnnnnnnnnnnnnnnnnnnnnnnnnnnnnnnnnnnnnnnnnnnnnnnnnnnnnnnnnnnnnnnnnnnnnnnnnnnnnnnnnnnnnnnnnnnnnnnnnnnnnnnnnnnnnnnnnnnnnnnnnnnnnnnnnnnnnnnnnnnnnnnnnnnnnnnnnnnnnnnnnnnnnnnnnnnnnnnnnnnnnnnnnnnnnnnnnnnnnnnnnnnnnnnnnnnnnnnnnnnnnnnnnnnnnnnnnnnnnnnnnnnnnnnnnnnnnnnnnnnnnnnnnnnnnnnnnnnnnnnnnnnnnnnnnnnnnnnnnnnnnnnnnnnnnnnnnnnnnnnnnnnnnnnnnnnnnnnnnnnnnnnnnnnnnnnnnnnnnnnnnnnnnnnnnnnnnnnnnnnnnnnnnnnnnnnnnnnnnnnnnnnnnnnnnnnnnnnnnnnnnnnnnnnnnnnnnnnnnnnnnnnnnnnnnnnnnnnnnnnnnnnnnnnnnnnnnnnnnnnnnnnnnnnnnnnnnnnnnnnnnnnnnnnnnnnnnnnnnnnnnnnnnnnnnnnnnnnnnnnnnnnnnnnnnnnnnnnnnnnnnnnnnnnnnnnnnnnnnnnnnnnnnnnnnnnnnnnnnnnnnnnnnnnnnnnnnnnnnnnnnnnnnnnnnnnnnnnnnnnnnnnnnnnnnnnnnnnnnnnnnnnnnnnnnnnnnnnnnnnnnnnnnnnnnnnnnnnnnnnnnnnnnnnnnnnnnnnnnnnnnnnnnnnnnnnnnnnnnnnnnnnnnnnnnnnnnnnnnnnnnnnnnnnnnnnnnnnnnnnnnnnnnnnnnnnnnnnnnnnnnnnnnnnnnnnnnnnnnnnnnnnnnnnnnnnnnnnnnnnnnnnnnnnnnnnnnnnnnnnnnnnnnnnnnnnnnnnnnnnnnnnnnnnnnnnnnnnnnnnnnnnnnnnnnnnnnnnnnnnnnnnnnnnnnnnnnnnnnnnnnnnnnnnnnnnnnnnnnnnnnnnnnnnnnnnnnnnnnnnnnnnnnnnnnnnnnnnnnnnnnnnnnnnnnnnnnnnnnnnnnnnnnnnnnnnnnnnnnnnnnnnnnnnnnnnnnnnnnnnnnnnnnnnnnnnnnnnnnnnnnnnnnnnnnnnnnnnnnnnnnnnnnnnnnnnnnnnnnnnnnnnnnnnnnnnnnnnnnnnnnnnnnnnnnnnnnnnnnnnnnnnnnnnnnnnnnnnnnnnnnnnnnnnnnnnnnnnnnnnnnnnnnnnnnnnnnnnnnnnnnnnnnnnnnnnnnnnnnnnnnnnnnnnnnnnnnnnnnnnnnnnnnnnnnnnnnnnnnnnnnnnnnnnnnnnnnnnnnnnnnnnnnnnnnnnnnnnnnnnnnnnnnnnnnnnnnnnnnnnnnnnnnnnnnnnnnnnnnnnnnnnnnnnnnnnnnnnnnnnnnnnnnnnnnnnnnnnnnnnnnnnnnnnnnnnnnnnnnnnnnnnnnnnnnnnnnnnnnnnnnnnnnnnnnnnnnnnnnnnnnnnnnnnnnnnnnnnnnnnnnnnnnnnnnnnnnnnnnnnnnnnnnnnnnnnnnnnnnnnnnnnnnnnnnnnnnnnnnnnnnnnnnnnnnnnnnnnnnnnnnnnnnnnnnnnnnnnnnnnnnnnnnnnnnnnnnnnnnnnnnnnnnnnnnnnnnnnnnnnnnnnnnnnnnnnnnnnnnnnnnnnnnnnnnnnnnnnnnnnnnnnnnnnnnnnnnnnnnnnnnnnnnnnnnnnnnnnnnnnnnnnnnnnnnnnnnnnnnnnnnnnnnnnnnnnnnnnnnnnnnnnnnnnnnnnnnnnnnnnnnnnnnnnnnnnnnnnnnnnnnnnnnnnnnnnnnnnnnnnnnnnnnnnnnnnnnnnnnnnnnnnnnnnnnnnnnnnnnnnnnnnnnnnnnnnnnnnnnnnnnnnnnnnnnnnnnnnnnnnnnnnnnnnnnnnnnnnnnnnnnnnnnnnnnnnnnnnnnnnnnnnnnnnnnnnnnnnnnnnnnnnnnnnnnnnnnnnnnnnnnnnnnnnnnnnnnnnnnnnnnnnnnnnnnnnnnnnnnnnnnnnnnnnnnnnnnnnnnnnnnnnnnnnnnnnnnnnnnnnnnnnnnnnnnnnnnnnnnnnnnnnnnnnnnnnnnnnnnnnnnnnnnnnnnnnnnnnnnnnnnnnnnnnnnnnnnnnnnnnnnnnnnnnnnnnnnnnnnnnnnnnnnnnnnnnnnnnnnnnnnnnnnnnnnnnnnnnnnnnnnnnnnnnnnnnnnnnnnnnnnnnnnnnnnnnnnnnnnnnnnnnnnnnnnnnnnnnnnnnnnnnnnnnnnnnnnnnnnnnnnnnnnnnnnnnnnnnnnnnnnnnnnnnnnnnnnnnnnnnnnnnnnnnnnnnnnnnnnnnnnnnnnnnnnnnnnnnnnnnnnnnnnnnnnnnnnnnnnnnnnnnnnnnnnnnnnnnnnnnnnnnnnnnnnnnnnnnnnnnnnnnnnnnnnnnnnnnnnnnnnnnnnnnnnnnnnnnnnnnnnnnnnnnnnnnnnnnnnnnnnnnnnnnnnnnnnnnnnnnnnnnnnnnnnnnnnnnnnnnnnnnnnnnnnnnnnnnnnnnnnnnnnnnnnnnnnnnnnnnnnnnnnnnnnnnnnnnnnnnnnnnnnnnnnnnnnnnnnnnnnnnnnnnnnnnnnnnnnnnnnnnnnnnnnnnnnnnnnnnnnnnnnnnnnnnnnnnnnnnnnnnnnnnnnnnnnnnnnnnnnnnnnnnnnnnnnnnnnnnnnnnnnnnnnnnnnnnnnnnnnnnnnnnnnnnnnnnnnnnnnnnnnnnnnnnnnnnnnnnnnnnnnnnnnnnnnnnnnnnnnnnnnnnnnnnnnnnnnnnnnnnnnnnnnnnnnnnnnnnnnnnnnnnnnnnnnnnnnnnnnnnnnnnnnnnnnnnnnnnnnnnnnnnnnnnnnnnnnnnnnnnnnnnnnnnnnnnnnnnnnnnnnnnnnnnnnnnnnnnnnnnnnnnnnnnnnnnnnnnnnnnnnnnnnnnnnnnnnnnnnnnnnnnnnnnnnnnnnnnnnnnnnnnnnnnnnnnnnnnnnnnnnnnnnnnnnnnnnnnnnnnnnnnnnnnnnnnnnnnnnnnnnnnnnnnnnnnnnnnnnnnnnnnnnnnnnnnnnnnnnnnnnnnnnnnnnnnnnnnnnnnnnnnnnnnnnnnnnnnnnnnnnnnnnnnnnnnnnnnnnnnnnnnnnnnnnnnnnnnnnnnnnnnnnnnnnnnnnnnnnnnnnnnnnnnnnnnnnnnnnnnnnnnnnnnnnnnnnnnnnnnnnnnnnnnnnnnnnnnnnnnnnnnnnnnnnnnnnnnnnnnnnnnnnnnnnnnnnnnnnnnnnnnnnnnnnnnnnnnnnnnnnnnnnnnnnnnnnnnnnnnnnnnnnnnnnnnnnnnnnnnnnnnnnnnnnnnnnnnnnnnnnnnnnnnnnnnnnnnnnnnnnnnnnnnnnnnnnnnnnnnnnnnnnnnnnnnnnnnnnnnnnnnnnnnnnnnnnnnnnnnnnnnnnnnnnnnnnnnnnnnnnnnnnnnnnnnnnnnnnnnnnnnnnnnnnnnnnnnnnnnnnnnnnnnnnnnnnnnnnnnnnnnnnnnnnnnnnnnnnnnnnnnnnnnnnnnnnnnnnnnnnnnnnnnnnnnnnnnnnnnnnnnnnnnnnnnnnnnnnnnnnnnnnnnnnnnnnnnnnnnnnnnnnnnnnnnnnnnnnnnnnnnnnnnnnnnnnnnnnnnnnnnnnnnnnnnnnnnnnnnnnnnnnnnnnnnnnnnnnnnnnnnnnnnnnnnnnnnnnnnnnnnnnnnnnnnnnnnnnnnnnnnnnnnnnnnnnnnnnnnnnnnnnnnnnnnnnnnnnnnnnnnnnnnnnnnnnnnnnnnnnnnnnnnnnnnnnnnnnnnnnnnnnnnnnnnnnnnnnnnnnnnnnnnnnnnnnnnnnnnnnnnnnnnnnnnnnnnnnnnnnnnnnnnnnnnnnnnnnnnnnnnnnnnnnnnnnnnnnnnnnnnnnnnnnnnnnnnnnnnnnnnnnnnnnnnnnnnnnnnnnnnnnnnnnnnnnnnnnnnnnnnnnnnnnnnnnnnnnnnnnnnnnnnnnnnnnnnnnnnnnnnnnnnnnnnnnnnnnnnnnnnnnnnnnnnnnnnnnnnnnnnnnnnnnnnnnnnnnnnnnnnnnnnnnnnnnnnnnnnnnnnnnnnnnnnnnnnnnnnnnnnnnnnnnnnnnnnnnnnnnnnnnnnnnnnnnnnnnnnnnnnnnnnnnnnnnnnnnnnnnnnnnnnnnnnnnnnnnnnnnnnnnnnnnnnnnnnnnnnnnnnnnnnnnnnnnnnnnnnnnnnnnnnnnnnnnnnnnnnnnnnnnnnnnnnnnnnnnnnnnnnnnnnnnnnnnnnnnnnnnnnnnnnnnnnnnnnnnnnnnnnnnnnnnnnnnnnnnnnnnnnnnnnnnnnnnnnnnnnnnnnnnnnnnnnnnnnnnnnnnnnnnnnnnnnnnnnnnnnnnnnnnnnnnnnnnnnnnnnnnnnnnnnnnnnnnnnnnnnnnnnnnnnnnnnnnnnnnnnnnnnnnnnnnnnnnnnnnnnnnnnnnnnnnnnnnnnnnnnnnnnnnnnnnnnnnnnnnnnnnnnnnnnnnnnnnnnnnnnnnnnnnnnnnnnnnnnnnnnnnnnnnnnnnnnnnnnnnnnnnnnnnnnnnnnnnnnnnnnnnnnnnnnnnnnnnnnnnnnnnnnnnnnnnnnnnnnnnnnnnnnnnnnnnnnnnnnnnnnnnnnnnnnnnnnnnnnnnnnnnnnnnnnnnnnnnnnnnnnnnnnnnnnnnnnnnnnnnnnnnnnnnnnnnnnnnnnnnnnnnnnnnnnnnnnnnnnnnnnnnnnnnnnnnnnnnnnnnnnnnnnnnnnnnnnnnnnnnnnnnnnnnnnnnnnnnnnnnnnnnnnnnnnnnnnnnnnnnnnnnnnnnnnnnnnnnnnnnnnnnnnnnnnnnnnnnnnnnnnnnnnnnnnnnnnnnnnnnnnnnnnnnnnnnnnnnnnnnnnnnnnnnnnnnnnnnnnnnnnnnnnnnnnnnnnnnnnnnnnnnnnnnnnnnnnnnnnnnnnnnnnnnnnnnnnnnnnnnnnnnnnnnnnnnnnnnnnnnnnnnnnnnnnnnnnnnnnnnnnnnnnnnnnnnnnnnnnnnnnnnnnnnnnnnnnnnnnnnnnnnnnnnnnnnnnnnnnnnnnnnnnnnnnnnnnnnnnnnnnnnnnnnnnnnnnnnnnnnnnnnnnnnnnnnnnnnnnnnnnnnnnnnnnnnnnnnnnnnnnnnnnnnnnnnnnnnnnnnnnnnnnnnnnnnnnnnnnnnnnnnnnnnnnnnnnnnnnnnnnnnnnnnnnnnnnnnnnnnnnnnnnnnnnnnnnnnnnnnnnnnnnnnnnnnnnnnnnnnnnnnnnnnnnnnnnnnnnnnnnnnnnnnnnnnnnnnnnnnnnnnnnnnnnnnnnnnnnnnnnnnnnnnnnnnnnnnnnnnnnnnnnnnnnnnnnnnnnnnnnnnnnnnnnnnnnnnnnnnnnnnnnnnnnnnnnnnnnnnnnnnnnnnnnnnnnnnnnnnnnnnnnnnnnnnnnnnnnnnnnnnnnnnnnnnnnnnnnnnnnnnnnnnnnnnnnnnnnnnnnnnnnnnnnnnnnnnnnnnnnnnnnnnnnnnnnnnnnnnnnnnnnnnnnnnnnnnnnnnnnnnnnnnnnnnnnnnnnnnnnnnnnnnnnnnnnnnnnnnnnnnnnnnnnnnnnnnnnnnnnnnnnnnnnnnnnnnnnnnnnnnnnnnnnnnnnnnnnnnnnnnnnnnnnnnnnnnnnnnnnnnnnnnnnnnnnnnnnnnnnnnnnnnnnnnnnnnnnnnnnnnnnnnnnnnnnnnnnnnnnnnnnnnnnnnnnnnnnnnnnnnnnnnnnnnnnnnnnnnnnnnnnnnnnnnnnnnnnnnnnnnnnnnnnnnnnnnnnnnnnnnnnnnnnnnnnnnnnnnnnnnnnnnnnnnnnnnnnnnnnnnnnnnnnnnnnnnnnnnnnnnnnnnnnnnnnnnnnnnnnnnnnnnnnnnnnnnnnnnnnnnnnnnnnnnnnnnnnnnnnnnnnnnnnnnnnnnnnnnnnnnnnnnnnnnnnnnnnnnnnnnnnnnnnnnnnnnnnnnnnnnnnnnnnnnnnnnnnnnnnnnnnnnnnnnnnnnnnnnnnnnnnnnnnnnnnnnnnnnnnnnnnnnnnnnnnnnnnnnnnnnnnnnnnnnnnnnnnnnnnnnnnnnnnnnnnnnnnnnnnnnnnnnnnnnnnnnnnnnnnnnnnnnnnnnnnnnnnnnnnnnnnnnnnnnnnnnnnnnnnnnnnnnnnnnnnnnnnnnnnnnnnnnnnnnnnnnnnnnnnnnnnnnnnnnnnnnnnnnnnnnnnnnnnnnnnnnnnnnnnnnnnnnnnnnnnnnnnnnnnnnnnnnnnnnnnnnnnnnnnnnnnnnnnnnnnnnnnnnnnnnnnnnnnnnnnnnnnnnnnnnnnnnnnnnnnnnnnnnnnnnnnnnnnnnnnnnnnnnnnnnnnnnnnnnnnnnnnnnnnnnnnnnnnnnnnnnnnnnnnnnnnnnnnnnnnnnnnnnnnnnnnnnnnnnnnnnnnnnnnnnnnnnnnnnnnnnnnnnnnnnnnnnnnnnnnnnnnnnnnnnnnnnnnnnnnnnnnnnnnnnnnnnnnnnnnnnnnnnnnnnnnnnnnnnnnnnnnnnnnnnnnnnnnnnnnnnnnnnnnnnnnnnnnnnnnnnnnnnnnnnnnnnnnnnnnnnnnnnnnnnnnnnnnnnnnnnnnnnnnnnnnnnnnnnnnnnnnnnnnnnnnnnnnnnnnnnnnnnnnnnnnnnnnnnnnnnnnnnnnnnnnnnnnnnnnnnnnnnnnnnnnnnnnnnnnnnnnnnnnnnnnnnnnnnnnnnnnnnnnnnnnnnnnnnnnnnnnnnnnnnnnnnnnnnnnnnnnnnnnnnnnnnnnnnnnnnnnnnnnnnnnnnnnnnnnnnnnnnnnnnnnnnnnnnnnnnnnnnnnnnnnnnnnnnnnnnnnnnnnnnnnnnnnnnnnnnnnnnnnnnnnnnnnnnnnnnnnnnnnnnnnnnnnnnnnnnnnnnnnnnnnnnnnnnnnnnnnnnnnnnnnnnnnnnnnnnnnnnnnnnnnnnnnnnnnnnnnnnnnnnnnnnnnnnnnnnnnnnnnnnnnnnnnnnnnnnnnnnnnnnnnnnnnnnnnnnnnnnnnnnnnnnnnnnnnnnnnnnnnnnnnnnnnnnnnnnnnnnnnnnnnnnnnnnnnnnnnnnnnnnnnnnnnnnnnnnnnnnnnnnnnnnnnnnnnnnnnnnnnnnnnnnnnnnnnnnnnnnnnnnnnnnnnnnnnnnnnnnnnnnnnnnnnnnnnnnnnnnnnnnnnnnnnnnnnnnnnnnnnnnnnnnnnnnnnnnnnnnnnnnnnnnnnnnnnnnnnnnnnnnnnnnnnnnnnnnnnnnnnnnnnnnnnnnnnnnnnnnnnnnnnnnnnnnnnnnnnnnnnnnnnnnnnnnnnnnnnnnnnnnnnnnnnnnnnnnnnnnnnnnnnnnnnnnnnnnnnnnnnnnnnnnnnnnnnnnnnnnnnnnnnnnnnnnnnnnnnnnnnnnnnnnnnnnnnnnnnnnnnnnnnnnnnnnnnnnnnnnnnnnnnnnnnnnnnnnnnnnnnnnnnnnnnnnnnnnnnnnnnnnnnnnnnnnnnnnnnnnnnnnnnnnnnnnnnnnnnnnnnnnnnnnnnnnnnnnnnnnnnnnnnnnnnnnnnnnnnnnnnnnnnnnnnnnnnnnnnnnnnnnnnnnnnnnnnnnnnnnnnnnnnnnnnnnnnnnnnnnnnnnnnnnnnnnnnnnnnnnnnnnnnnnnnnnnnnnnnnnnnnnnnnnnnnnnnnnnnnnnnnnnnnnnnnnnnnnnnnnnnnnnnnnnnnnnnnnnnnnnnnnnnnnnnnnnnnnnnnnnnnnnnnnnnnnnnnnnnnnnnnnnnnnnnnnnnnnnnnnnnnnnnnnnnnnnnnnnnnnnnnnnnnnnnnnnnnnnnnnnnnnnnnnnnnnnnnnnnnnnnnnnnnnnnnnnnnnnnnnnnnnnnnnnnnnnnnnnnnnnnnnnnnnnnnnnnnnnnnnnnnnnnnnnnnnnnnnnnnnnnnnnnnnnnnnnnnnnnnnnnnnnnnnnnnnnnnnnnnnnnnnnnnnnnnnnnnnnnnnnnnnnnnnnnnnnnnnnnnnnnnnnnnnnnnnnnnnnnnnnnnnnnnnnnnnnnnnnnnnnnnnnnnnnnnnnnnnnnnnnnnnnnnnnnnnnnnnnnnnnnnnnnnnnnnnnnnnnnnnnnnnnnnnnnnnnnnnnnnnnnnnnnnnnnnnnnnnnnnnnnnnnnnnnnnnnnnnnnnnnnnnnnnnnnnnnnnnnnnnnnnnnnnnnnnnnnnnnnnnnnnnnnnnnnnnnnnnnnnnnnnnnnnnnnnnnnnnnnnnnnnnnnnnnnnnnnnnnnnnnnnnnnnnnnnnnnnnnnnnnnnnnnnnnnnnnnnnnnnnnnnnnnnnnnnnnnnnnnnnnnnnnnnnnnnnnnnnnnnnnnnnnnnnnnnnnnnnnnnnnnnnnnnnnnnnnnnnnnnnnnnnnnnnnnnnnnnnnnnnnnnnnnnnnnnnnnnnnnnnnnnnnnnnnnnnnnnnnnnnnnnnnnnnnnnnnnnnnnnnnnnnnnnnnnnnnnnnnnnnnnnnnnnnnnnnnnnnnnnnnnnnnnnnnnnnnnnnnnnnnnnnnnnnnnnnnnnnnnnnnnnnnnnnnnnnnnnnnnnnnnnnnnnnnnnnnnnnnnnnnnnnnnnnnnnnnnnnnnnnnnnnnnnnnnnnnnnnnnnnnnnnnnnnnnnnnnnnnnnnnnnnnnnnnnnnnnnnnnnnnnnnnnnnnnnnnnnnnnnnnnnnnnnnnnnnnnnnnnnnnnnnnnnnnnnnnnnnnnnnnnnnnnnnnnnnnnnnnnnnnnnnnnnnnnnnnnnnnnnnnnnnnnnnnnnnnnnnnnnnnnnnnnnnnnnnnnnnnnnnnnnnnnnnnnnnnnnnnnnnnnnnnnnnnnnnnnnnnnnnnnnnnnnnnnnnnnnnnnnnnnnnnnnnnnnnnnnnnnnnnnnnnnnnnnnnnnnnnnnnnnnnnnnnnnnnnnnnnnnnnnnnnnnnnnnnnnnnnnnnnnnnnnnnnnnnnnnnnnnnnnnnnnnnnnnnnnnnnnnnnnnnnnnnnnnnnnnnnnnnnnnnnnnnnnnnnnnnnnnnnnnnnnnnnnnnnnnnnnnnnnnnnnnnnnnnnnnnnnnnnnnnnnnnnnnnnnnnnnnnnnnnnnnnnnnnnnnnnnnnnnnnnnnnnnnnnnnnnnnnnnnnnnnnnnnnnnnnnnnnnnnnnnnnnnnnnnnnnnnnnnnnnnnnnnnnnnnnnnnnnnnnnnnnnnnnnnnnnnnnnnnnnnnnnnnnnnnnnnnnnnnnnnnnnnnnnnnnnnnnnnnnnnnnnnnnnnnnnnnnnnnnnnnnnnnnnnnnnnnnnnnnnnnnnnnnnnnnnnnnnnnnnnnnnnnnnnnnnnnnnnnnnnnnnnnnnnnnnnnnnnnnnnnnnnnnnnnnnnnnnnnnnnnnnnnnnnnnnnnnnnnnnnnnnnnnnnnnnnnnnnnnnnnnnnnnnnnnnnnnnnnnnnnnnnnnnnnnnnnnnnnnnnnnnnnnnnnnnnnnnnnnnnnnnnnnnnnnnnnnnnnnnnnnnnnnnnnnnnnnnnnnnnnnnnnnnnnnnnnnnnnnnnnnnnnnnnnnnnnnnnnnnnnnnnnnnnnnnnnnnnnnnnnnnnnnnnnnnnnnnnnnnnnnnnnnnnnnnnnnnnnnnnnnnnnnnnnnnnnnnnnnnnnnnnnnnnnnnnnnnnnnnnnnnnnnnnnnnnnnnnnnnnnnnnnnnnnnnnnnnnnnnnnnnnnnnnnnnnnnnnnnnnnnnnnnnnnnnnnnnnnnnnnnnnnnnnnnnnnnnnnnnnnnnnnnnnnnnnnnnnnnnnnnnnnnnnnnnnnnnnnnnnnnnnnnnnnnnnnnnnnnnnnnnnnnnnnnnnnnnnnnnnnnnnnnnnnnnnnnnnnnnnnnnnnnnnnnnnnnnnnnnnnnnnnnnnnnnnnnnnnnnnnnnnnnnnnnnnnnnnnnnnnnnnnnnnnnnnnnnnnnnnnnnnnnnnnnnnnnnnnnnnnnnnnnnnnnnnnnnnnnnnnnnnnnnnnnnnnnnnnnnnnnnnnnnnnnnnnnnnnnnnnnnnnnnnnnnnnnnnnnnnnnnnnnnnnnnnnnnnnnnnnnnnnnnnnnnnnnnnnnnnnnnnnnnnnnnnnnnnnnnnnnnnnnnnnnnnnnnnnnnnnnnnnnnnnnnnnnnnnnnnnnnnnnnnnnnnnnnnnnnnnnnnnnnnnnnnnnnnnnnnnnnnnnnnnnnnnnnnnnnnnnnnnnnnnnnnnnnnnnnnnnnnnnnnnnnnnnnnnnnnnnnnnnnnnnnnnnnnnnnnnnnnnnnnnnnnnnnnnnnnnnnnnnnnnnnnnnnnnnnnnnnnnnnnnnnnnnnnnnnnnnnnnnnnnnnnnnnnnnnnnnnnnnnnnnnnnnnnnnnnnnnnnnnnnnnnnnnnnnnnnnnnnnnnnnnnnnnnnnnnnnnnnnnnnnnnnnnnnnnnnnnnnnnnnnnnnnnnnnnnnnnnnnnnnnnnnnnnnnnnnnnnnnnnnnnnnnnnnnnnnnnnnnnnnnnnnnnnnnnnnnnnnnnnnnnnnnnnnnnnnnnnnnnnnnnnnnnnnnnnnnnnnnnnnnnnnnnnnnnnnnnnnnnnnnnnnnnnnnnnnnnnnnnnnnnnnnnnnnnnnnnnnnnnnnnnnnnnnnnnnnnnnnnnnnnnnnnnnnnnnnnnnnnnnnnnnnnnnnnnnnnnnnnnnnnnnnnnnnnnnnnnnnnnnnnnnnnnnnnnnnnnnnnnnnnnnnnnnnnnnnnnnnnnnnnnnnnnnnnnnnnnnnnnnnnnnnnnnnnnnnnnnnnnnnnnnnnnnnnnnnnnnnnnnnnnnnnnnnnnnnnnnnnnnnnnnnnnnnnnnnnnnnnnnnnnnnnnnnnnnnnnnnnnnnnnnnnnnnnnnnnnnnnnnnnnnnnnnnnnnnnnnnnnnnnnnnnnnnnnnnnnnnnnnnnnnnnnnnnnnnnnnnnnnnnnnnnnnnnnnnnnnnnnnnnnnnnnnnnnnnnnnnnnnnnnnnnnnnnnnnnnnnnnnnnnnnnnnnnnnnnnnnnnnnnnnnnnnnnnnnnnnnnnnnnnnnnnnnnnnnnnnnnnnnnnnnnnnnnnnnnnnnnnnnnnnnnnnnnnnnnnnnnnnnnnnnnnnnnnnnnnnnnnnnnnnnnnnnnnnnnnnnnnnnnnnnnnnnnnnnnnnnnnnnnnnnnnnnnnnnnnnnnnnnnnnnnnnnnnnnnnnnnnnnnnnnnnnnnnnnnnnnnnnnnnnnnnnnnnnnnnnnnnnnnnnnnnnnnnnnnnnnnnnnnnnnnnnnnnnnnnnnnnnnnnnnnnnnnnnnnnnnnnnnnnnnnnnnnnnnnnnnnnnnnnnnnnnnnnnnnnnnnnnnnnnnnnnnnnnnnnnnnnnnnnnnnnnnnnnnnnnnnnnnnnnnnnnnnnnnnnnnnnnnnnnnnnnnnnnnnnnnnnnnnnnnnnnnnnnnnnnnnnnnnnnnnnnnnnnnnnnnnnnnnnnnnnnnnnnnnnnnnnnnnnnnnnnnnnnnnnnnnnnnnnnnnnnnnnnnnnnnnnnnnnnnnnnnnnnnnnnnnnnnnnnnnnnnnnnnnnnnnnnnnnnnnnnnnnnnnnnnnnnnnnnnnnnnnnnnnnnnnnnnnnnnnnnnnnnnnnnnnnnnnnnnnnnnnnnnnnnnnnnnnnnnnnnnnnnnnnnnnnnnnnnnnnnnnnnnnnnnnnnnnnnnnnnnnnnnnnnnnnnnnnnnnnnnnnnnnnnnnnnnnnnnnnnnnnnnnnnnnnnnnnnnnnnnnnnnnnnnnnnnnnnnnnnnnnnnnnnnnnnnnnnnnnnnnnnnnnnnnnnnnnnnnnnnnnnnnnnnnnnnnnnnnnnnnnnnnnnnnnnnnnnnnnnnnnnnnnnnnnnnnnnnnnnnnnnnnnnnnnnnnnnnnnnnnnnnnnnnnnnnnnnnnnnnnnnnnnnnnnnnnnnnnnnnnnnnnnnnnnnnnnnnnnnnnnnnnnnnnnnnnnnnnnnnnnnnnnnnnnnnnnnnnnnnnnnnnnnnnnnnnnnnnnnnnnnnnnnnnnnnnnnnnnnnnnnnnnnnnnnnnnnnnnnnnnnnnnnnnnnnnnnnnnnnnnnnnnnnnnnnnnnnnnnnnnnnnnnnnnnnnnnnnnnnnnnnnnnnnnnnnnnnnnnnnnnnnnnnnnnnnnnnnnnnnnnnnnnnnnnnnnnnnnnnnnnnnnnnnnnnnnnnnnnnnnnnnnnnnnnnnnnnnnnnnnnnnnnnnnnnnnnnnnnnnnnnnnnnnnnnnnnnnnnnnnnnnnnnnnnnnnnnnnnnnnnnnnnnnnnnnnnnnnnnnnnnnnnnnnnnnnnnnnnnnnnnnnnnnnnnnnnnnnnnnnnnnnnnnnnnnnnnnnnnnnnnnnnnnnnnnnnnnnnnnnnnnnnnnnnnnnnnnnnnnnnnnnnnnnnnnnnnnnnnnnnnnnnnnnnnnnnnnnnnnnnnnnnnnnnnnnnnnnnnnnnnnnnnnnnnnnnnnnnnnnnnnnnnnnnnnnnnnnnnnnnnnnnnnnnnnnnnnnnnnnnnnnnnnnnnnnnnnnnnnnnnnnnnnnnnnnnnnnnnnnnnnnnnnnnnnnnnnnnnnnnnnnnnnnnnnnnnnnnnnnnnnnnnnnnnnnnnnnnnnnnnnnnnnnnnnnnnnnnnnnnnnnnnnnnnnnnnnnnnnnnnnnnnnnnnnnnnnnnnnnnnnnnnnnnnnnnnnnnnnnnnnnnnnnnnnnnnnnnnnnnnnnnnnnnnnnnnnnnnnnnnnnnnnnnnnnnnnnnnnnnnnnnnnnnnnnnnnnnnnnnnnnnnnnnnnnnnnnnnnnnnnnnnnnnnnnnnnnnnnnnnnnnnnnnnnnnnnnnnnnnnnnnnnnnnnnnnnnnnnnnnnnnnnnnnnnnnnnnnnnnnnnnnnnnnnnnnnnnnnnnnnnnnnnnnnnnnnnnnnnnnnnnnnnnnnnnnnnnnnnnnnnnnnnnnnnnnnnnnnnnnnnnnnnnnnnnnnnnnnnnnnnnnnnnnnnnnnnnnnnnnnnnnnnnnnnnnnnnnnnnnnnnnnnnnnnnnnnnnnnnnnnnnnnnnnnnnnnnnnnnnnnnnnnnnnnnnnnnnnnnnnnnnnnnnnnnnnnnnnnnnnnnnnnnnnnnnnnnnnnnnnnnnnnnnnnnnnnnnnnnnnnnnnnnnnnnnnnnnnnnnnnnnnnnnnnnnnnnnnnnnnnnnnnnnnnnnnnnnnnnnnnnnnnnnnnnnnnnnnnnnnnnnnnnnnnnnnnnnnnnnnnnnnnnnnnnnnnnnnnnnnnnnnnnnnnnnnnnnnnnnnnnnnnnnnnnnnnnnnnnnnnnnnnnnnnnnnnnnnnnnnnnnnnnnnnnnnnnnnnnnnnnnnnnnnnnnnnnnnnnnnnnnnnnnnnnnnnnnnnnnnnnnnnnnnnnnnnnnnnnnnnnnnnnnnnnnnnnnnnnnnnnnnnnnnnnnnnnnnnnnnnnnnnnnnnnnnnnnnnnnnnnnnnnnnnnnnnnnnnnnnnnnnnnnnnnnnnnnnnnnnnnnnnnnnnnnnnnnnnnnnnnnnnnnnnnnnnnnnnnnnnnnnnnnnnnnnnnnnnnnnnnnnnnnnnnnnnnnnnnnnnnnnnnnnnnnnnnnnnnnnnnnnnnnnnnnnnnnnnnnnnnnnnnnnnnnnnnnnnnnnnnnnnnnnnnnnnnnnnnnnnnnnnnnnnnnnnnnnnnnnnnnnnnnnnnnnnnnnnnnnnnnnnnnnnnnnnnnnnnnnnnnnnnnnnnnnnnnnnnnnnnnnnnnnnnnnnnnnnnnnnnnnnnnnnnnnnnnnnnnnnnnnnnnnnnnnnnnnnnnnnnnnnnnnnnnnnnnnnnnnnnnnnnnnnnnnnnnnnnnnnnnnnnnnnnnnnnnnnnnnnnnnnnnnnnnnnnnnnnnnnnnnnnnnnnnnnnnnnnnnnnnnnnnnnnnnnnnnnnnnnnnnnnnnnnnnnnnnnnnnnnnnnnnnnnnnnnnnnnnnnnnnnnnnnnnnnnnnnnnnnnnnnnnnnnnnnnnnnnnnnnnnnnnnnnnnnnnnnnnnnnnnnnnnnnnnnnnnnnnnnnnnnnnnnnnnnnnnnnnnnnnnnnnnnnnnnnnnnnnnnnnnnnnnnnnnnnnnnnnnnnnnnnnnnnnnnnnnnnnnnnnnnnnnnnnnnnnnnnnnnnnnnnnnnnnnnnnnnnnnnnnnnnnnnnnnnnnnnnnnnnnnnnnnnnnnnnnnnnnnnnnnnnnnnnnnnnnnnnnnnnnnnnnnnnnnnnnnnnnnnnnnnnnnnnnnnnnnnnnnnnnnnnnnnnnnnnnnnnnnnnnnnnnnnnnnnnnnnnnnnnnnnnnnnnnnnnnnnnnnnnnnnnnnnnnnnnnnnnnnnnnnnnnnnnnnnnnnnnnnnnnnnnnnnnnnnnnnnnnnnnnnnnnnnnnnnnnnnnnnnnnnnnnnnnnnnnnnnnnnnnnnnnnnnnnnnnnnnnnnnnnnnnnnnnnnnnnnnnnnnnnnnnnnnnnnnnnnnnnnnnnnnnnnnnnnnnnnnnnnnnnnnnnnnnnnnnnnnnnnnnnnnnnnnnnnnnnnnnnnnnnnnnnnnnnnnnnnnnnnnnnnnnnnnnnnnnnnnnnnnnnnnnnnnnnnnnnnnnnnnnnnnnnnnnnnnnnnnnnnnnnnnnnnnnnnnnnnnnnnnnnnnnnnnnnnnnnnnnnnnnnnnnnnnnnnnnnnnnnnnnnnnnnnnnnnnnnnnnnnnnnnnnnnnnnnnnnnnnnnnnnnnnnnnnnnnnnnnnnnnnnnnnnnnnnnnnnnnnnnnnnnnnnnnnnnnnnnnnnnnnnnnnnnnnnnnnnnnnnnnnnnnnnnnnnnnnnnnnnnnnnnnnnnnnnnnnnnnnnnnnnnnnnnnnnnnnnnnnnnnnnnnnnnnnnnnnnnnnnnnnnnnnnnnnnnnnnnnnnnnnnnnnnnnnnnnnnnnnnnnnnnnnnnnnnnnnnnnnnnnnnnnnnnnnnnnnnnnnnnnnnnnnnnnnnnnnnnnnnnnnnnnnnnnnnnnnnnnnnnnnnnnnnnnnnnnnnnnnnnnnnnnnnnnnnnnnnnnnnnnnnnnnnnnnnnnnnnnnnnnnnnnnnnnnnnnnnnnnnnnnnnnnnnnnnnnnnnnnnnnnnnnnnnnnnnnnnnnnnnnnnnnnnnnnnnnnnnnnnnnnnnnnnnnnnnnnnnnnnnnnnnnnnnnnnnnnnnnnnnnnnnnnnnnnnnnnnnnnnnnnnnnnnnnnnnnnnnnnnnnnnnnnnnnnnnnnnnnnnnnnnnnnnnnnnnnnnnnnnnnnnnnnnnnnnnnnnnnnnnnnnnnnnnnnnnnnnnnnnnnnnnnnnnnnnnnnnnnnnnnnnnnnnnnnnnnnnnnnnnnnnnnnnnnnnnnnnnnnnnnnnnnnnnnnnnnnnnnnnnnnnnnnnnnnnnnnnnnnnnnnnnnnnnnnnnnnnnnnnnnnnnnnnnnnnnnnnnnnnnnnnnnnnnnnnnnnnnnnnnnnnnnnnnnnnnnnnnnnnnnnnnnnnnnnnnnnnnnnnnnnnnnnnnnnnnnnnnnnnnnnnnnnnnnnnnnnnnnnnnnnnnnnnnnnnnnnnnnnnnnnnnnnnnnnnnnnnnnnnnnnnnnnnnnnnnnnnnnnnnnnnnnnnnnnnnnnnnnnnnnnnnnnnnnnnnnnnnnnnnnnnnnnnnnnnnnnnnnnnnnnnnnnnnnnnnnnnnnnnnnnnnnnnnnnnnnnnnnnnnnnnnnnnnnnnnnnnnnnnnnnnnnnnnnnnnnnnnnnnnnnnnnnnnnnnnnnnnnnnnnnnnnnnnnnnnnnnnnnnnnnnnnnnnnnnnnnnnnnnnnnnnnnnnnnnnnnnnnnnnnnnnnnnnnnnnnnnnnnnnnnnnnnnnnnnnnnnnnnnnnnnnnnnnnnnnnnnnnnnnnnnnnnnnnnnnnnnnnnnnnnnnnnnnnnnnnnnnnnnnnnnnnnnnnnnnnnnnnnnnnnnnnnnnnnnnnnnnnnnnnnnnnnnnnnnnnnnnnnnnnnnnnnnnnnnnnnnnnnnnnnnnnnnnnnnnnnnnnnnnnnnnnnnnnnnnnnnnnnnnnnnnnnnnnnnnnnnnnnnnnnnnnnnnnnnnnnnnnnnnnnnnnnnnnnnnnnnnnnnnnnnnnnnnnnnnnnnnnnnnnnnnnnnnnnnnnnnnnnnnnnnnnnnnnnnnnnnnnnnnnnnnnnnnnnnnnnnnnnnnnnnnnnnnnnnnnnnnnnnnnnnnnnnnnnnnnnnnnnnnnnnnnnnnnnnnnnnnnnnnnnnnnnnnnnnnnnnnnnnnnnnnnnnnnnnnnnnnnnnnnnnnnnnnnnnnnnnnnnnnnnnnnnnnnnnnnnnnnnnnnnnnnnnnnnnnnnnnnnnnnnnnnnnnnnnnnnnnnnnnnnnnnnnnnnnnnnnnnnnnnnnnnnnnnnnnnnnnnnnnnnnnnnnnnnnnnnnnnnnnnnnnnnnnnnnnnnnnnnnnnnnnnnnnnnnnnnnnnnnnnnnnnnnnnnnnnnnnnnnnnnnnnnnnnnnnnnnnnnnnnnnnnnnnnnnnnnnnnnnnnnnnnnnnnnnnnnnnnnnnnnnnnnnnnnnnnnnnnnnnnnnnnnnnnnnnnnnnnnnnnnnnnnnnnnnnnnnnnnnnnnnnnnnnnnnnnnnnnnnnnnnnnnnnnnnnnnnnnnnnnnnnnnnnnnnnnnnnnnnnnnnnnnnnnnnnnnnnnnnnnnnnnnnnnnnnnnnnnnnnnnnnnnnnnnnnnnnnnnnnnnnnnnnnnnnnnnnnnnnnnnnnnnnnnnnnnnnnnnnnnnnnnnnnnnnnnnnnnnnnnnnnnnnnnnnnnnnnnnnnnnnnnnnnnnnnnnnnnnnnnnnnnnnnnnnnnnnnnnnnnnnnnnnnnnnnnnnnnnnnnnnnnnnnnnnnnnnnnnnnnnnnnnnnnnnnnnnnnnnnnnnnnnnnnnnnnnnnnnnnnnnnnnnnnnnnnnnnnnnnnnnnnnnnnnnnnnnnnnnnnnnnnnnnnnnnnnnnnnnnnnnnnnnnnnnnnnnnnnnnnnnnnnnnnnnnnnnnnnnnnnnnnnnnnnnnnnnnnnnnnnnnnnnnnnnnnnnnnnnnnnnnnnnnnnnnnnnnnnnnnnnnnnnnnnnnnnnnnnnnnnnnnnnnnnnnnnnnnnnnnnnnnnnnnnnnnnnnnnnnnnnnnnnnnnnnnnnnnnnnnnnnnnnnnnnnnnnnnnnnnnnnnnnnnnnnnnnnnnnnnnnnnnnnnnnnnnnnnnnnnnnnnnnnnnnnnnnnnnnnnnnnnnnnnnnnnnnnnnnnnnnnnnnnnnnnnnnnnnnnnnnnnnnnnnnnnnnnnnnnnnnnnnnnnnnnnnnnnnnnnnnnnnnnnnnnnnnnnnnnnnnnnnnnnnnnnnnnnnnnnnnnnnnnnnnnnnnnnnnnnnnnnnnnnnnnnnnnnnnnnnnnnnnnnnnnnnnnnnnnnnnnnnnnnnnnnnnnnnnnnnnnnnnnnnnnnnnnnnnnnnnnnnnnnnnnnnnnnnnnnnnnnnnnnnnnnnnnnnnnnnnnnnnnnnnnnnnnnnnnnnnnnnnnnnnnnnnnnnnnnnnnnnnnnnnnnnnnnnnnnnnnnnnnnnnnnnnnnnnnnnnnnnnnnnnnnnnnnnnnnnnnnnnnnnnnnnnnnnnnnnnnnnnnnnnnnnnnnnnnnnnnnnnnnnnnnnnnnnnnnnnnnnnnnnnnnnnnnnnnnnnnnnnnnnnnnnnnnnnnnnnnnnnnnnnnnnnnnnnnnnnnnnnnnnnnnnnnnnnnnnnnnnnnnnnnnnnnnnnnnnnnnnnnnnnnnnnnnnnnnnnnnnnnnnnnnnnnnnnnnnnnnnnnnnnnnnnnnnnnnnnnnnnnnnnnnnnnnnnnnnnnnnnnnnnnnnnnnnnnnnnnnnnnnnnnnnnnnnnnnnnnnnnnnnnnnnnnnnnnnnnnnnnnnnnnnnnnnnnnnnnnnnnnnnnnnnnnnnnnnnnnnnnnnnnnnnnnnnnnnnnnnnnnnnnnnnnnnnnnnnnnnnnnnnnnnnnnnnnnnnnnnnnnnnnnnnnnnnnnnnnnnnnnnnnnnnnnnnnnnnnnnnnnnnnnnnnnnnnnnnnnnnnnnnnnnnnnnnnnnnnnnnnnnnnnnnnnnnnnnnnnnnnnnnnnnnnnnnnnnnnnnnnnnnnnnnnnnnnnnnnnnnnnnnnnnnnnnnnnnnnnnnnnnnnnnnnnnnnnnnnnnnnnnnnnnnnnnnnnnnnnnnnnnnnnnnnnnnnnnnnnnnnnnnnnnnnnnnnnnnnnnnnnnnnnnnnnnnnnnnnnnnnnnnnnnnnnnnnnnnnnnnnnnnnnnnnnnnnnnnnnnnnnnnnnnnnnnnnnnnnnnnnnnnnnnnnnnnnnnnnnnnnnnnnnnnnnnnnnnnnnnnnnnnnnnnnnnnnnnnnnnnnnnnnnnnnnnnnnnnnnnnnnnnnnnnnnnnnnnnnnnnnnnnnnnnnnnnnnnnnnnnnnnnnnnnnnnnnnnnnnnnnnnnnnnnnnnnnnnnnnnnnnnnnnnnnnnnnnnnnnnnnnnnnnnnnnnnnnnnnnnnnnnnnnnnnnnnnnnnnnnnnnnnnnnnnnnnnnnnnnnnnnnnnnnnnnnnnnnnnnnnnnnnnnnnnnnnnnnnnnnnnnnnnnnnnnnnnnnnnnnnnnnnnnnnnnnnnnnnnnnnnnnnnnnnnnnnnnnnnnnnnnnnnnnnnnnnnnnnnnnnnnnnnnnnnnnnnnnnnnnnnnnnnnnnnnnnnnnnnnnnnnnnnnnnnnnnnnnnnnnnnnnnnnnnnnnnnnnnnnnnnnnnnnnnnnnnnnnnnnnnnnnnnnnnnnnnnnnnnnnnnnnnnnnnnnnnnnnnnnnnnnnnnnnnnnnnnnnnnnnnnnnnnnnnnnnnnnnnnnnnnnnnnnnnnnnnnnnnnnnnnnnnnnnnnnnnnnnnnnnnnnnnnnnnnnnnnnnnnnnnnnnnnnnnnnnnnnnnnnnnnnnnnnnnnnnnnnnnnnnnnnnnnnnnnnnnnnnnnnnnnnnnnnnnnnnnnnnnnnnnnnnnnnnnnnnnnnnnnnnnnnnnnnnnnnnnnnnnnnnnnnnnnnnnnnnnnnnnnnnnnnnnnnnnnnnnnnnnnnnnnnnnnnnnnnnnnnnnnnnnnnnnnnnnnnnnnnnnnnnnnnnnnnnnnnnnnnnnnnnnnnnnnnnnnnnnnnnnnnnnnnnnnnnnnnnnnnnnnnnnnnnnnnnnnnnnnnnnnnnnnnnnnnnnnnnnnnnnnnnnnnnnnnnnnnnnnnnnnnnnnnnnnnnnnnnnnnnnnnnnnnnnnnnnnnnnnnnnnnnnnnnnnnnnnnnnnnnnnnnnnnnnnnnnnnnnnnnnnnnnnnnnnnnnnnnnnnnnnnnnnnnnnnnnnnnnnnnnnnnnnnnnnnnnnnnnnnnnnnnnnnnnnnnnnnnnnnnnnnnnnnnnnnnnnnnnnnnnnnnnnnnnnnnnnnnnnnnnnnnnnnnnnnnnnnnnnnnnnnnnnnnnnnnnnnnnnnnnnnnnnnnnnnnnnnnnnnnnnnnnnnnnnnnnnnnnnnnnnnnnnnnnnnnnnnnnnnnnnnnnnnnnnnnnnnnnnnnnnnnnnnnnnnnnnnnnnnnnnnnnnnnnnnnnnnnnnnnnnnnnnnnnnnnnnnnnnnnnnnnnnnnnnnnnnnnnnnnnnnnnnnnnnnnnnnnnnnnnnnnnnnnnnnnnnnnnnnnnnnnnnnnnnnnnnnnnnnnnnnnnnnnnnnnnnnnnnnnnnnnnnnnnnnnnnnnnnnnnnnnnnnnnnnnnnnnnnnnnnnnnnnnnnnnnnnnnnnnnnnnnnnnnnnnnnnnnnnnnnnnnnnnnnnnnnnnnnnnnnnnnnnnnnnnnnnnnnnnnnnnnnnnnnnnnnnnnnnnnnnnnnnnnnnnnnnnnnnnnnnnnnnnnnnnnnnnnnnnnnnnnnnnnnnnnnnnnnnnnnnnnnnnnnnnnnnnnnnnnnnnnnnnnnnnnnnnnnnnnnnnnnnnnnnnnnnnnnnnnnnnnnnnnnnnnnnnnnnnnnnnnnnnnnnnnnnnnnnnnnnnnnnnnnnnnnnnnnnnnnnnnnnnnnnnnnnnnnnnnnnnnnnnnnnnnnnnnnnnnnnnnnnnnnnnnnnnnnnnnnnnnnnnnnnnnnnnnnnnnnnnnnnnnnnnnnnnnnnnnnnnnnnnnnnnnnnnnnnnnnnnnnnnnnnnnnnnnnnnnnnnnnnnnnnnnnnnnnnnnnnnnnnnnnnnnnnnnnnnnnnnnnnnnnnnnnnnnnnnnnnnnnnnnnnnnnnnnnnnnnnnnnnnnnnnnnnnnnnnnnnnnnnnnnnnnnnnnnnnnnnnnnnnnnnnnnnnnnnnnnnnnnnnnnnnnnnnnnnnnnnnnnnnnnnnnnnnnnnnnnnnnnnnnnnnnnnnnnnnnnnnnnnnnnnnnnnnnnnnnnnnnnnnnnnnnnnnnnnnnnnnnnnnnnnnnnnnnnnnnnnnnnnnnnnnnnnnnnnnnnnnnnnnnnnnnnnnnnnnnnnnnnnnnnnnnnnnnnnnnnnnnnnnnnnnnnnnnnnnnnnnnnnnnnnnnnnnnnnnnnnnnnnnnnnnnnnnnnnnnnnnnnnnnnnnnnnnnnnnnnnnnnnnnnnnnnnnnnnnnnnnnnnnnnnnnnnnnnnnnnnnnnnnnnnnnnnnnnnnnnnnnnnnnnnnnnnnnnnnnnnnnnnnnnnnnnnnnnnnnnnnnnnnnnnnnnnnnnnnnnnnnnnnnnnnnnnnnnnnnnnnnnnnnnnnnnnnnnnnnnnnnnnnnnnnnnnnnnnnnnnnnnnnnnnnnnnnnnnnnnnnnnnnnnnnnnnnnnnnnnnnnnnnnnnnnnnnnnnnnnnnnnnnnnnnnnnnnnnnnnnnnnnnnnnnnnnnnnnnnnnnnnnnnnnnnnnnnnnnnnnnnnnnnnnnnnnnnnnnnnnnnnnnnnnnnnnnnnnnnnnnnnnnnnnnnnnnnnnnnnnnnnnnnnnnnnnnnnnnnnnnnnnnnnnnnnnnnnnnnnnnnnnnnnnnnnnnnnnnnnnnnnnnnnnnnnnnnnnnnnnnnnnnnnnnnnnnnnnnnnnnnnnnnnnnnnnnnnnnnnnnnnnnnnnnnnnnnnnnnnnnnnnnnnnnnnnnnnnnnnnnnnnnnnnnnnnnnnnnnnnnnnnnnnnnnnnnnnnnnnnnnnnnnnnnnnnnnnnnnnnnnnnnnnnnnnnnnnnnnnnnnnnnnnnnnnnnnnnnnnnnnnnnnnnnnnnnnnnnnnnnnnnnnnnnnnnnnnnnnnnnnnnnnnnnnnnnnnnnnnnnnnnnnnnnnnnnnnnnnnnnnnnnnnnnnnnnnnnnnnnnnnnnnnnnnnnnnnnnnnnnnnnnnnnnnnnnnnnnnnnnnnnnnnnnnnnnnnnnnnnnnnnnnnnnnnnnnnnnnnnnnnnnnnnnnnnnnnnnnnnnnnnnnnnnnnnnnnnnnnnnnnnnnnnnnnnnnnnnnnnnnnnnnnnnnnnnnnnnnnnnnnnnnnnnnnnnnnnnnnnnnnnnnnnnnnnnnnnnnnnnnnnnnnnnnnnnnnnnnnnnnnnnnnnnnnnnnnnnnnnnnnnnnnnnnnnnnnnnnnnnnnnnnnnnnnnnnnnnnnnnnnnnnnnnnnnnnnnnnnnnnnnnnnnnnnnnnnnnnnnnnnnnnnnnnnnnnnnnnnnnnnnnnnnnnnnnnnnnnnnnnnnnnnnnnnnnnnnnnnnnnnnnnnnnnnnnnnnnnnnnnnnnnnnnnnnnnnnnnnnnnnnnnnnnnnnnnnnnnnnnnnnnnnnnnnnnnnnnnnnnnnnnnnnnnnnnnnnnnnnnnnnnnnnnnnnnnnnnnnnnnnnnnnnnnnnnnnnnnnnnnnnnnnnnnnnnnnnnnnnnnnnnnnnnnnnnnnnnnnnnnnnnnnnnnnnnnnnnnnnnnnnnnnnnnnnnnnnnnnnnnnnnnnnnnnnnnnnnnnnnnnnnnnnnnnnnnnnnnnnnnnnnnnnnnnnnnnnnnnnnnnnnnnnnnnnnnnnnnnnnnnnnnnnnnnnnnnnnnnnnnnnnnnnnnnnnnnnnnnnnnnnnnnnnnnnnnnnnnnnnnnnnnnnnnnnnnnnnnnnnnnnnnnnnnnnnnnnnnnnnnnnnnnnnnnnnnnnnnnnnnnnnnnnnnnnnnnnnnnnnnnnnnnnnnnnnnnnnnnnnnnnnnnnnnnnnnnnnnnnnnnnnnnnnnnnnnnnnnnnnnnnnnnnnnnnnnnnnnnnnnnnnnnnnnnnnnnnnnnnnnnnnnnnnnnnnnnnnnnnnnnnnnnnnnnnnnnnnnnnnnnnnnnnnnnnnnnnnnnnnnnnnnnnnnnnnnnnnnnnnnnnnnnnnnnnnnnnnnnnnnnnnnnnnnnnnnnnnnnnnnnnnnnnnnnnnnnnnnnnnnnnnnnnnnnnnnnnnnnnnnnnnnnnnnnnnnnnnnnnnnnnnnnnnnnnnnnnnnnnnnnnnnnnnnnnnnnnnnnnnnnnnnnnnnnnnnnnnnnnnnnnnnnnnnnnnnnnnnnnnnnnnnnnnnnnnnnnnnnnnnnnnnnnnnnnnnnnnnnnnnnnnnnnnnnnnnnnnnnnnnnnnnnnnnnnnnnnnnnnnnnnnnnnnnnnnnnnnnnnnnnnnnnnnnnnnnnnnnnnnnnnnnnnnnnnnnnnnnnnnnnnnnnnnnnnnnnnnnnnnnnnnnnnnnnnnnnnnnnnnnnnnnnnnnnnnnnnnnnnnnnnnnnnnnnnnnnnnnnnnnnnnnnnnnnnnnnnnnnnnnnnnnnnnnnnnnnnnnnnnnnnnnnnnnnnnnnnnnnnnnnnnnnnnnnnnnnnnnnnnnnnnnnnnnnnnnnnnnnnnnnnnnnnnnnnnnnnnnnnnnnnnnnnnnnnnnnnnnnnnnnnnnnnnnnnnnnnnnnnnnnnnnnnnnnnnnnnnnnnnnnnnnnnnnnnnnnnnnnnnnnnnnnnnnnnnnnnnnnnnnnnnnnnnnnnnnnnnnnnnnnnnnnnnnnnnnnnnnnnnnnnnnnnnnnnnnnnnnnnnnnnnnnnnnnnnnnnnnnnnnnnnnnnnnnnnnnnnnnnnnnnnnnnnnnnnnnnnnnnnnnnnnnnnnnnnnnnnnnnnnnnnnnnnnnnnnnnnnnnnnnnnnnnnnnnnnnnnnnnnnnnnnnnnnnnnnnnnnnnnnnnnnnnnnnnnnnnnnnnnnnnnnnnnnnnnnnnnnnnnnnnnnnnnnnnnnnnnnnnnnnnnnnnnnnnnnnnnnnnnnnnnnnnnnnnnnnnnnnnnnnnnnnnnnnnnnnnnnnnnnnnnnnnnnnnnnnnnnnnnnnnnnnnnnnnnnnnnnnnnnnnnnnnnnnnnnnnnnnnnnnnnnnnnnnnnnnnnnnnnnnnnnnnnnnnnnnnnnnnnnnnnnnnnnnnnnnnnnnnnnnnnnnnnnnnnnnnnnnnnnnnnnnnnnnnnnnnnnnnnnnnnnnnnnnnnnnnnnnnnnnnnnnnnnnnnnnnnnnnnnnnnnnnnnnnnnnnnnnnnnnnnnnnnnnnnnnnnnnnnnnnnnnnnnnnnnnnnnnnnnnnnnnnnnnnnnnnnnnnnnnnnnnnnnnnnnnnnnnnnnnnnnnnnnnnnnnnnnnnnnnnnnnnnnnnnnnnnnnnnnnnnnnnnnnnnnnnnnnnnnnnnnnnnnnnnnnnnnnnnnnnnnnnnnnnnnnnnnnnnnnnnnnnnnnnnnnnnnnnnnnnnnnnnnnnnnnnnnnnnnnnnnnnnnnnnnnnnnnnnnnnnnnnnnnnnnnnnnnnnnnnnnnnnnnnnnnnnnnnnnnnnnnnnnnnnnnnnnnnnnnnnnnnnnnnnnnnnnnnnnnnnnnnnnnnnnnnnnnnnnnnnnnnnnnnnnnnnnnnnnnnnnnnnnnnnnnnnnnnnnnnnnnnnnnnnnnnnnnnnnnnnnnnnnnnnnnnnnnnnnnnnnnnnnnnnnnnnnnnnnnnnnnnnnnnnnnnnnnnnnnnnnnnnnnnnnnnnnnnnnnnnnnnnnnnnnnnnnnnnnnnnnnnnnnnnnnnnnnnnnnnnnnnnnnnnnnnnnnnnnnnnnnnnnnnnnnnnnnnnnnnnnnnnnnnnnnnnnnnnnnnnnnnnnnnnnnnnnnnnnnnnnnnnnnnnnnnnnnnnnnnnnnnnnnnnnnnnnnnnnnnnnnnnnnnnnnnnnnnnnnnnnnnnnnnnnnnnnnnnnnnnnnnnnnnnnnnnnnnnnnnnnnnnnnnnnnnnnnnnnnnnnnnnnnnnnnnnnnnnnnnnnnnnnnnnnnnnnnnnnnnnnnnnnnnnnnnnnnnnnnnnnnnnnnnnnnnnnnnnnnnnnnnnnnnnnnnnnnnnnnnnnnnnnnnnnnnnnnnnnnnnnnnnnnnnnnnnnnnnnnnnnnnnnnnnnnnnnnnnnnnnnnnnnnnnnnnnnnnnnnnnnnnnnnnnnnnnnnnnnnnnnnnnnnnnnnnnnnnnnnnnnnnnnnnnnnnnnnnnnnnnnnnnnnnnnnnnnnnnnnnnnnnnnnnnnnnnnnnnnnnnnnnnnnnnnnnnnnnnnnnnnnnnnnnnnnnnnnnnnnnnnnnnnnnnnnnnnnnnnnnnnnnnnnnnnnnnnnnnnnnnnnnnnnnnnnnnnnnnnnnnnnnnnnnnnnnnnnnnnnnnnnnnnnnnnnnnnnnnnnnnnnnnnnnnnnnnnnnnnnnnnnnnnnnnnnnnnnnnnnnnnnnnnnnnnnnnnnnnnnnnnnnnnnnnnnnnnnnnnnnnnnnnnnnnnnnnnnnnnnnnnnnnnnnnnnnnnnnnnnnnnnnnnnnnnnnnnnnnnnnnnnnnnnnnnnnnnnnnnnnnnnnnnnnnnnnnnnnnnnnnnnnnnnnnnnnnnnnnnnnnnnnnnnnnnnnnnnnnnnnnnnnnnnnnnnnnnnnnnnnnnnnnnnnnnnnnnnnnnnnnnnnnnnnnnnnnnnnnnnnnnnnnnnnnnnnnnnnnnnnnnnnnnnnnnnnnnnnnnnnnnnnnnnnnnnnnnnnnnnnnnnnnnnnnnnnnnnnnnnnnnnnnnnnnnnnnnnnnnnnnnnnnnnnnnnnnnnnnnnnnnnnnnnnnnnnnnnnnnnnnnnnnnnnnnnnnnnnnnnnnnnnnnnnnnnnnnnnnnnnnnnnnnnnnnnnnnnnnnnnnnnnnnnnnnnnnnnnnnnnnnnnnnnnnnnnnnnnnnnnnnnnnnnnnnnnnnnnnnnnnnnnnnnnnnnnnnnnnnnnnnnnnnnnnnnnnnnnnnnnnnnnnnnnnnnnnnnnnnnnnnnnnnnnnnnnnnnnnnnnnnnnnnnnnnnnnnnnnnnnnnnnnnnnnnnnnnnnnnnnnnnnnnnnnnnnnnnnnnnnnnnnnnnnnnnnnnnnnnnnnnnnnnnnnnnnnnnnnnnnnnnnnnnnnnnnnnnnnnnnnnnnnnnnnnnnnnnnnnnnnnnnnnnnnnnnnnnnnnnnnnnnnnnnnnnnnnnnnnnnnnnnnnnnnnnnnnnnnnnnnnnnnnnnnnnnnnnnnnnnnnnnnnnnnnnnnnnnnnnnnnnnnnnnnnnnnnnnnnnnnnnnnnnnnnnnnnnnnnnnnnnnnnnnnnnnnnnnnnnnnnnnnnnnnnnnnnnnnnnnnnnnnnnnnnnnnnnnnnnnnnnnnnnnnnnnnnnnnnnnnnnnnnnnnnnnnnnnnnnnnnnnnnnnnnnnnnnnnnnnnnnnnnnnnnnnnnnnnnnnnnnnnnnnnnnnnnnnnnnnnnnnnnnnnnnnnnnnnnnnnnnnnnnnnnnnnnnnnnnnnnnnnnnnnnnnnnnnnnnnnnnnnnnnnnnnnnnnnnnnnnnnnnnnnnnnnnnnnnnnnnnnnnnnnnnnnnnnnnnnnnnnnnnnnnnnnnnnnnnnnnnnnnnnnnnnnnnnnnnnnnnnnnnnnnnnnnnnnnnnnnnnnnnnnnnnnnnnnnnnnnnnnnnnnnnnnnnnnnnnnnnnnnnnnnnnnnnnnnnnnnnnnnnnnnnnnnnnnnnnnnnnnnnnnnnnnnnnnnnnnnnnnnnnnnnnnnnnnnnnnnnnnnnnnnnnnnnnnnnnnnnnnnnnnnnnnnnnnnnnnnnnnnnnnnnnnnnnnnnnnnnnnnnnnnnnnnnnnnnnnnnnnnnnnnnnnnnnnnnnnnnnnnnnnnnnnnnnnnnnnnnnnnnnnnnnnnnnnnnnnnnnnnnnnnnnnnnnnnnnnnnnnnnnnnnnnnnnnnnnnnnnnnnnnnnnnnnnnnnnnnnnnnnnnnnnnnnnnnnnnnnnnnnnnnnnnnnnnnnnnnnnnnnnnnnnnnnnnnnnnnnnnnnnnnnnnnnnnnnnnnnnnnnnnnnnnnnnnnnnnnnnnnnnnnnnnnnnnnnnnnnnnnnnnnnnnnnnnnnnnnnnnnnnnnnnnnnnnnnnnnnnnnnnnnnnnnnnnnnnnnnnnnnnnnnnnnnnnnnnnnnnnnnnnnnnnnnnnnnnnnnnnnnnnnnnnnnnnnnnnnnnnnnnnnnnnnnnnnnnnnnnnnnnnnnnnnnnnnnnnnnnnnnnnnnnnnnnnnnnnnnnnnnnnnnnnnnnnnnnnnnnnnnnnnnnnnnnnnnnnnnnnnnnnnnnnnnnnnnnnnnnnnnnnnnnnnnnnnnnnnnnnnnnnnnnnnnnnnnnnnnnnnnnnnnnnnnnnnnnnnnnnnnnnnnnnnnnnnnnnnnnnnnnnnnnnnnnnnnnnnnnnnnnnnnnnnnnnnnnnnnnnnnnnnnnnnnnnnnnnnnnnnnnnnnnnnnnnnnnnnnnnnnnnnnnnnnnnnnnnnnnnnnnnnnnnnnnnnnnnnnnnnnnnnnnnnnnnnnnnnnnnnnnnnnnnnnnnnnnnnnnnnnnnnnnnnnnnnnnnnnnnnnnnnnnnnnnnnnnnnnnnnnnnnnnnnnnnnnnnnnnnnnnnnnnnnnnnnnnnnnnnnnnnnnnnnnnnnnnnnnnnnnnnnnnnnnnnnnnnnnnnnnnnnnnnnnnnnnnnnnnnnnnnnnnnnnnnnnnnnnnnnnnnnnnnnnnnnnnnnnnnnnnnnnnnnnnnnnnnnnnnnnnnnnnnnnnnnnnnnnnnnnnnnnnnnnnnnnnnnnnnnnnnnnnnnnnnnnnnnnnnnnnnnnnnnnnnnnnnnnnnnnnnnnnnnnnnnnnnnnnnnnnnnnnnnnnnnnnnnnnnnnnnnnnnnnnnnnnnnnnnnnnnnnnnnnnnnnnnnnnnnnnnnnnnnnnnnnnnnnnnnnnnnnnnnnnnnnnnnnnnnnnnnnnnnnnnnnnnnnnnnnnnnnnnnnnnnnnnnnnnnnnnnnnnnnnnnnnnnnnnnnnnnnnnnnnnnnnnnnnnnnnnnnnnnnnnnnnnnnnnnnnnnnnnnnnnnnnnnnnnnnnnnnnnnnnnnnnnnnnnnnnnnnnnnnnnnnnnnnnnnnnnnnnnnnnnnnnnnnnnnnnnnnnnnnnnnnnnnnnnnnnnnnnnnnnnnnnnnnnnnnnnnnnnnnnnnnnnnnnnnnnnnnnnnnnnnnnnnnnnnnnnnnnnnnnnnnnnnnnnnnnnnnnnnnnnnnnnnnnnnnnnnnnnnnnnnnnnnnnnnnnnnnnnnnnnnnnnnnnnnnnnnnnnnnnnnnnnnnnnnnnnnnnnnnnnnnnnnnnnnnnnnnnnnnnnnnnnnnnnnnnnnnnnnnnnnnnnnnnnnnnnnnnnnnnnnnnnnnnnnnnnnnnnnnnnnnnnnnnnnnnnnnnnnnnnnnnnnnnnnnnnnnnnnnnnnnnnnnnnnnnnnnnnnnnnnnnnnnnnnnnnnnnnnnnnnnnnnnnnnnnnnnnnnnnnnnnnnnnnnnnnnnnnnnnnnnnnnnnnnnnnnnnnnnnnnnnnnnnnnnnnnnnnnnnnnnnnnnnnnnnnnnnnnnnnnnnnnnnnnnnnnnnnnnnnnnnnnnnnnnnnnnnnnnnnnnnnnnnnnnnnnnnnnnnnnnnnnnnnnnnnnnnnnnnnnnnnnnnnnnnnnnnnnnnnnnnnnnnnnnnnnnnnnnnnnnnnnnnnnnnnnnnnnnnnnnnnnnnnnnnnnnnnnnnnnnnnnnnnnnnnnnnnnnnnnnnnnnnnnnnnnnnnnnnnnnnnnnnnnnnnnnnnnnnnnnnnnnnnnnnnnnnnnnnnnnnnnnnnnnnnnnnnnnnnnnnnnnnnnnnnnnnnnnnnnnnnnnnnnnnnnnnnnnnnnnnnnnnnnnnnnnnnnnnnnnnnnnnnnnnnnnnnnnnnnnnnnnnnnnnnnnnnnnnnnnnnnnnnnnnnnnnnnnnnnnnnnnnnnnnnnnnnnnnnnnnnnnnnnnnnnnnnnnnnnnnnnnnnnnnnnnnnnnnnnnnnnnnnnnnnnnnnnnnnnnnnnnnnnnnnnnnnnnnnnnnnnnnnnnnnnnnnnnnnnnnnnnnnnnnnnnnnnnnnnnnnnnnnnnnnnnnnnnnnnnnnnnnnnnnnnnnnnnnnnnnnnnnnnnnnnnnnnnnnnnnnnnnnnnnnnnnnnnnnnnnnnnnnnnnnnnnnnnnnnnnnnnnnnnnnnnnnnnnnnnnnnnnnnnnnnnnnnnnnnnnnnnnnnnnnnnnnnnnnnnnnnnnnnnnnnnnnnnnnnnnnnnnnnnnnnnnnnnnnnnnnnnnnnnnnnnnnnnnnnnnnnnnnnnnnnnnnnnnnnnnnnnnnnnnnnnnnnnnnnnnnnnnnnnnnnnnnnnnnnnnnnnnnnnnnnnnnnnnnnnnnnnnnnnnnnnnnnnnnnnnnnnnnnnnnnnnnnnnnnnnnnnnnnnnnnnnnnnnnnnnnnnnnnnnnnnnnnnnnnnnnnnnnnnnnnnnnnnnnnnnnnnnnnnnnnnnnnnnnnnnnnnnnnnnnnnnnnnnnnnnnnnnnnnnnnnnnnnnnnnnnnnnnnnnnnnnnnnnnnnnnnnnnnnnnnnnnnnnnnnnnnnnnnnnnnnnnnnnnnnnnnnnnnnnnnnnnnnnnnnnnnnnnnnnnnnnnnnnnnnnnnnnnnnnnnnnnnnnnnnnnnnnnnnnnnnnnnnnnnnnnnnnnnnnnnnnnnnnnnnnnnnnnnnnnnnnnnnnnnnnnnnnnnnnnnnnnnnnnnnnnnnnnnnnnnnnnnnnnnnnnnnnnnnnnnnnnnnnnnnnnnnnnnnnnnnnnnnnnnnnnnnnnnnnnnnnnnnnnnnnnnnnnnnnnnnnnnnnnnnnnnnnnnnnnnnnnnnnnnnnnnnnnnnnnnnnnnnnnnnnnnnnnnnnnnnnnnnnnnnnnnnnnnnnnnnnnnnnnnnnnnnnnnnnnnnnnnnnnnnnnnnnnnnnnnnnnnnnnnnnnnnnnnnnnnnnnnnnnnnnnnnnnnnnnnnnnnnnnnnnnnnnnnnnnnnnnnnnnnnnnnnnnnnnnnnnnnnnnnnnnnnnnnnnnnnnnnnnnnnnnnnnnnnnnnnnnnnnnnnnnnnnnnnnnnnnnnnnnnnnnnnnnnnnnnnnnnnnnnnnnnnnnnnnnnnnnnnnnnnnnnnnnnnnnnnnnnnnnnnnnnnnnnnnnnnnnnnnnnnnnnnnnnnnnnnnnnnnnnnnnnnnnnnnnnnnnnnnnnnnnnnnnnnnnnnnnnnnnnnnnnnnnnnnnnnnnnnnnnnnnnnnnnnnnnnnnnnnnnnnnnnnnnnnnnnnnnnnnnnnnnnnnnnnnnnnnnnnnnnnnnnnnnnnnnnnnnnnnnnnnnnnnnnnnnnnnnnnnnnnnnnnnnnnnnnnnnnnnnnnnnnnnnnnnnnnnnnnnnnnnnnnnnnnnnnnnnnnnnnnnnnnnnnnnnnnnnnnnnnnnnnnnnnnnnnnnnnnnnnnnnnnnnnnnnnnnnnnnnnnnnnnnnnnnnnnnnnnnnnnnnnnnnnnnnnnnnnnnnnnnnnnnnnnnnnnnnnnnnnnnnnnnnnnnnnnnnnnnnnnnnnnnnnnnnnnnnnnnnnnnnnnnnnnnnnnnnnnnnnnnnnnnnnnnnnnnnnnnnnnnnnnnnnnnnnnnnnnnnnnnnnnnnnnnnnnnnnnnnnnnnnnnnnnnnnnnnnnnnnnnnnnnnnnnnnnnnnnnnnnnnnnnnnnnnnnnnnnnnnnnnnnnnnnnnnnnnnnnnnnnnnnnnnnnnnnnnnnnnnnnnnnnnnnnnnnnnnnnnnnnnnnnnnnnnnnnnnnnnnnnnnnnnnnnnnnnnnnnnnnnnnnnnnnnnnnnnnnnnnnnnnnnnnnnnnnnnnnnnnnnnnnnnnnnnnnnnnnnnnnnnnnnnnnnnnnnnnnnnnnnnnnnnnnnnnnnnnnnnnnnnnnnnnnnnnnnnnnnnnnnnnnnnnnnnnnnnnnnnnnnnnnnnnnnnnnnnnnnnnnnnnnnnnnnnnnnnnnnnnnnnnnnnnnnnnnnnnnnnnnnnnnnnnnnnnnnnnnnnnnnnnnnnnnnnnnnnnnnnnnnnnnnnnnnnnnnnnnnnnnnnnnnnnnnnnnnnnnnnnnnnnnnnnnnnnnnnnnnnnnnnnnnnnnnnnnnnnnnnnnnnnnnnnnnnnnnnnnnnnnnnnnnnnnnnnnnnnnnnnnnnnnnnnnnnnnnnnnnnnnnnnnnnnnnnnnnnnnnnnnnnnnnnnnnnnnnnnnnnnnnnnnnnnnnnnnnnnnnnnnnnnnnnnnnnnnnnnnnnnnnnnnnnnnnnnnnnnnnnnnnnnnnnnnnnnnnnnnnnnnnnnnnnnnnnnnnnnnnnnnnnnnnnnnnnnnnnnnnnnnnnnnnnnnnnnnnnnnnnnnnnnnnnnnnnnnnnnnnnnnnnnnnnnnnnnnnnnnnnnnnnnnnnnnnnnnnnnnnnnnnnnnnnnnnnnnnnnnnnnnnnnnnnnnnnnnnnnnnnnnnnnnnnnnnnnnnnnnnnnnnnnnnnnnnnnnnnnnnnnnnnnnnnnnnnnnnnnnnnnnnnnnnnnnnnnnnnnnnnnnnnnnnnnnnnnnnnnnnnnnnnnnnnnnnnnnnnnnnnnnnnnnnnnnnnnnnnnnnnnnnnnnnnnnnnnnnnnnnnnnnnnnnnnnnnnnnnnnnnnnnnnnnnnnnnnnnnnnnnnnnnnnnnnnnnnnnnnnnnnnnnnnnnnnnnnnnnnnnnnnnnnnnnnnnnnnnnnnnnnnnnnnnnnnnnnnnnnnnnnnnnnnnnnnnnnnnnnnnnnnnnnnnnnnnnnnnnnnnnnnnnnnnnnnnnnnnnnnnnnnnnnnnnnnnnnnnnnnnnnnnnnnnnnnnnnnnnnnnnnnnnnnnnnnnnnnnnnnnnnnnnnnnnnnnnnnnnnnnnnnnnnnnnnnnnnnnnnnnnnnnnnnnnnnnnnnnnnnnnnnnnnnnnnnnnnnnnnnnnnnnnnnnnnnnnnnnnnnnnnnnnnnnnnnnnnnnnnnnnnnnnnnnnnnnnnnnnnnnnnnnnnnnnnnnnnnnnnnnnnnnnnnnnnnnnnnnnnnnnnnnnnnnnnnnnnnnnnnnnnnnnnnnnnnnnnnnnnnnnnnnnnnnnnnnnnnnnnnnnnnnnnnnnnnnnnnnnnnnnnnnnnnnnnnnnnnnnnnnnnnnnnnnnnnnnnnnnnnnnnnnnnnnnnnnnnnnnnnnnnnnnnnnnnnnnnnnnnnnnnnnnnnnnnnnnnnnnnnnnnnnnnnnnnnnnnnnnnnnnnnnnnnnnnnnnnnnnnnnnnnnnnnnnnnnnnnnnnnnnnnnnnnnnnnnnnnnnnnnnnnnnnnnnnnnnnnnnnnnnnnnnnnnnnnnnnnnnnnnnnnnnnnnnnnnnnnnnnnnnnnnnnnnnnnnnnnnnnnnnnnnnnnnnnnnnnnnnnnnnnnnnnnnnnnnnnnnnnnnnnnnnnnnnnnnnnnnnnnnnnnnnnnnnnnnnnnnnnnnnnnnnnnnnnnnnnnnnnnnnnnnnnnnnnnnnnnnnnnnnnnnnnnnnnnnnnnnnnnnnnnnnnnnnnnnnnnnnnnnnnnnnnnnnnnnnnnnnnnnnnnnnnnnnnnnnnnnnnnnnnnnnnnnnnnnnnnnnnnnnnnnnnnnnnnnnnnnnnnnnnnnnnnnnnnnnnnnnnnnnnnnnnnnnnnnnnnnnnnnnnnnnnnnnnnnnnnnnnnnnnnnnnnnnnnnnnnnnnnnnnnnnnnnnnnnnnnnnnnnnnnnnnnnnnnnnnnnnnnnnnnnnnnnnnnnnnnnnnnnnnnnnnnnnnnnnnnnnnnnnnnnnnnnnnnnnnnnnnnnnnnnnnnnnnnnnnnnnnnnnnnnnnnnnnnnnnnnnnnnnnnnnnnnnnnnnnnnnnnnnnnnnnnnnnnnnnnnnnnnnnnnnnnnnnnnnnnnnnnnnnnnnnnnnnnnnnnnnnnnnnnnnnnnnnnnnnnnnnnnnnnnnnnnnnnnnnnnnnnnnnnnnnnnnnnnnnnnnnnnnnnnnnnnnnnnnnnnnnnnnnnnnnnnnnnnnnnnnnnnnnnnnnnnnnnnnnnnnnnnnnnnnnnnnnnnnnnnnnnnnnnnnnnnnnnnnnnnnnnnnnnnnnnnnnnnnnnnnnnnnnnnnnnnnnnnnnnnnnnnnnnnnnnnnnnnnnnnnnnnnnnnnnnnnnnnnnnnnnnnnnnnnnnnnnnnnnnnnnnnnnnnnnnnnnnnnnnnnnnnnnnnnnnnnnnnnnnnnnnnnnnnnnnnnnnnnnnnnnnnnnnnnnnnnnnnnnnnnnnnnnnnnnnnnnnnnnnnnnnnnnnnnnnnnnnnnnnnnnnnnnnnnnnnnnnnnnnnnnnnnnnnnnnnnnnnnnnnnnnnnnnnnnnnnnnnnnnnnnnnnnnnnnnnnnnnnnnnnnnnnnnnnnnnnnnnnnnnnnnnnnnnnnnnnnnnnnnnnnnnnnnnnnnnnnnnnnnnnnnnnnnnnnnnnnnnnnnnnnnnnnnnnnnnnnnnnnnnnnnnnnnnnnnnnnnnnnnnnnnnnnnnnnnnnnnnnnnnnnnnnnnnnnnnnnnnnnnnnnnnnnnnnnnnnnnnnnnnnnnnnnnnnnnnnnnnnnnnnnnnnnnnnnnnnnnnnnnnnnnnnnnnnnnnnnnnnnnnnnnnnnnnnnnnnnnnnnnnnnnnnnnnnnnnnnnnnnnnnnnnnnnnnnnnnnnnnnnnnnnnnnnnnnnnnnnnnnnnnnnnnnnnnnnnnnnnnnnnnnnnnnnnnnnnnnnnnnnnnnnnnnnnnnnnnnnnnnnnnnnnnnnnnnnnnnnnnnnnnnnnnnnnnnnnnnnnnnnnnnnnnnnnnnnnnnnnnnnnnnnnnnnnnnnnnnnnnnnnnnnnnnnnnnnnnnnnnnnnnnnnnnnnnnnnnnnnnnnnnnnnnnnnnnnnnnnnnnnnnnnnnnnnnnnnnnnnnnnnnnnnnnnnnnnnnnnnnnnnnnnnnnnnnnnnnnnnnnnnnnnnnnnnnnnnnnnnnnnnnnnnnnnnnnnnnnnnnnnnnnnnnnnnnnnnnnnnnnnnnnnnnnnnnnnnnnnnnnnnnnnnnnnnnnnnnnnnnnnnnnnnnnnnnnnnnnnnnnnnnnnnnnnnnnnnnnnnnnnnnnnnnnnnnnnnnnnnnnnnnnnnnnnnnnnnnnnnnnnnnnnnnnnnnnnnnnnnnnnnnnnnnnnnnnnnnnnnnnnnnnnnnnnnnnnnnnnnnnnnnnnnnnnnnnnnnnnnnnnnnnnnnnnnnnnnnnnnnnnnnnnnnnnnnnnnnnnnnnnnnnnnnnnnnnnnnnnnnnnnnnnnnnnnnnnnnnnnnnnnnnnnnnnnnnnnnnnnnnnnnnnnnnnnnnnnnnnnnnnnnnnnnnnnnnnnnnnnnnnnnnnnnnnnnnnnnnnnnnnnnnnnnnnnnnnnnnnnnnnnnnnnnnnnnnnnnnnnnnnnnnnnnnnnnnnnnnnnnnnnnnnnnnnnnnnnnnnnnnnnnnnnnnnnnnnnnnnnnnnnnnnnnnnnnnnnnnnnnnnnnnnnnnnnnnnnnnnnnnnnnnnnnnnnnnnnnnnnnnnnnnnnnnnnnnnnnnnnnnnnnnnnnnnnnnnnnnnnnnnnnnnnnnnnnnnnnnnnnnnnnnnnnnnnnnnnnnnnnnnnnnnnnnnnnnnnnnnnnnnnnnnnnnnnnnnnnnnnnnnnnnnnnnnnnnnnnnnnnnnnnnnnnnnnnnnnnnnnnnnnnnnnnnnnnnnnnnnnnnnnnnnnnnnnnnnnnnnnnnnnnnnnnnnnnnnnnnnnnnnnnnnnnnnnnnnnnnnnnnnnnnnnnnnnnnnnnnnnnnnnnnnnnnnnnnnnnnnnnnnnnnnnnnnnnnnnnnnnnnnnnnnnnnnnnnnnnnnnnnnnnnnnnnnnnnnnnnnnnnnnnnnnnnnnnnnnnnnnnnnnnnnnnnnnnnnnnnnnnnnnnnnnnnnnnnnnnnnnnnnnnnnnnnnnnnnnnnnnnnnnnnnnnnnnnnnnnnnnnnnnnnnnnnnnnnnnnnnnnnnnnnnnnnnnnnnnnnnnnnnnnnnnnnnnnnnnnnnnnnnnnnnnnnnnnnnnnnnnnnnnnnnnnnnnnnnnnnnnnnnnnnnnnnnnnnnnnnnnnnnnnnnnnnnnnnnnnnnnnnnnnnnnnnnnnnnnnnnnnnnnnnnnnnnnnnnnnnnnnnnnnnnnnnnnnnnnnnnnnnnnnnnnnnnnnnnnnnnnnnnnnnnnnnnnnnnnnnnnnnnnnnnnnnnnnnnnnnnnnnnnnnnnnnnnnnnnnnnnnnnnnnnnnnnnnnnnnnnnnnnnnnnnnnnnnnnnnnnnnnnnnnnnnnnnnnnnnnnnnnnnnnnnnnnnnnnnnnnnnnnnnnnnnnnnnnnnnnnnnnnnnnnnnnnnnnnnnnnnnnnnnnnnnnnnnnnnnnnnnnnnnnnnnnnnnnnnnnnnnnnnnnnnnnnnnnnnnnnnnnnnnnnnnnnnnnnnnnnnnnnnnnnnnnnnnnnnnnnnnnnnnnnnnnnnnnnnnnnnnnnnnnnnnnnnnnnnnnnnnnnnnnnnnnnnnnnnnnnnnnnnnnnnnnnnnnnnnnnnnnnnnnnnnnnnnnnnnnnnnnnnnnnnnnnnnnnnnnnnnnnnnnnnnnnnnnnnnnnnnnnnnnnnnnnnnnnnnnnnnnnnnnnnnnnnnnnnnnnnnnnnnnnnnnnnnnnnnnnnnnnnnnnnnnnnnnnnnnnnnnnnnnnnnnnnnnnnnnnnnnnnnnnnnnnnnnnnnnnnnnnnnnnnnnnnnnnnnnnnnnnnnnnnnnnnnnnnnnnnnnnnnnnnnnnnnnnnnnnnnnnnnnnnnnnnnnnnnnnnnnnnnnnnnnnnnnnnnnnnnnnnnnnnnnnnnnnnnnnnnnnnnnnnnnnnnnnnnnnnnnnnnnnnnnnnnnnnnnnnnnnnnnnnnnnnnnnnnnnnnnnnnnnnnnnnnnnnnnnnnnnnnnnnnnnnnnnnnnnnnnnnnnnnnnnnnnnnnnnnnnnnnnnnnnnnnnnnnnnnnnnnnnnnnnnnnnnnnnnnnnnnnnnnnnnnnnnnnnnnnnnnnnnnnnnnnnnnnnnnnnnnnnnnnnnnnnnnnnnnnnnnnnnnnnnnnnnnnnnnnnnnnnnnnnnnnnnnnnnnnnnnnnnnnnnnnnnnnnnnnnnnnnnnnnnnnnnnnnnnnnnnnnnnnnnnnnnnnnnnnnnnnnnnnnnnnnnnnnnnnnnnnnnnnnnnnnnnnnnnnnnnnnnnnnnnnnnnnnnnnnnnnnnnnnnnnnnnnnnnnnnnnnnnnnnnnnnnnnnnnnnnnnnnnnnnnnnnnnnnnnnnnnnnnnnnnnnnnnnnnnnnnnnnnnnnnnnnnnnnnnnnnnnnnnnnnnnnnnnnnnnnnnnnnnnnnnnnnnnnnnnnnnnnnnnnnnnnnnnnnnnnnnnnnnnnnnnnnnnnnnnnnnnnnnnnnnnnnnnnnnnnnnnnnnnnnnnnnnnnnnnnnnnnnnnnnnnnnnnnnnnnnnnnnnnnnnnnnnnnnnnnnnnnnnnnnnnnnnnnnnnnnnnnnnnnnnnnnnnnnnnnnnnnnnnnnnnnnnnnnnnnnnnnnnnnnnnnnnnnnnnnnnnnnnnnnnnnnnnnnnnnnnnnnnnnnnnnnnnnnnnnnnnnnnnnnnnnnnnnnnnnnnnnnnnnnnnnnnnnnnnnnnnnnnnnnnnnnnnnnnnnnnnnnnnnnnnnnnnnnnnnnnnnnnnnnnnnnnnnnnnnnnnnnnnnnnnnnnnnnnnnnnnnnnnnnnnnnnnnnnnnnnnnnnnnnnnnnnnnnnnnnnnnnnnnnnnnnnnnnnnnnnnnnnnnnnnnnnnnnnnnnnnnnnnnnnnnnnnnnnnnnnnnnnnnnnnnnnnnnnnnnnnnnnnnnnnnnnnnnnnnnnnnnnnnnnnnnnnnnnnnnnnnnnnnnnnnnnnnnnnnnnnnnnnnnnnnnnnnnnnnnnnnnnnnnnnnnnnnnnnnnnnnnnnnnnnnnnnnnnnnnnnnnnnnnnnnnnnnnnnnnnnnnnnnnnnnnnnnnnnnnnnnnnnnnnnnnnnnnnnnnnnnnnnnnnnnnnnnnnnnnnnnnnnnnnnnnnnnnnnnnnnnnnnnnnnnnnnnnnnnnnnnnnnnnnnnnnnnnnnnnnnnnnnnnnnnnnnnnnnnnnnnnnnnnnnnnnnnnnnnnnnnnnnnnnnnnnnnnnnnnnnnnnnnnnnnnnnnnnnnnnnnnnnnnnnnnnnnnnnnnnnnnnnnnnnnnnnnnnnnnnnnnnnnnnnnnnnnnnnnnnnnnnnnnnnnnnnnnnnnnnnnnnnnnnnnnnnnnnnnnnnnnnnnnnnnnnnnnnnnnnnnnnnnnnnnnnnnnnnnnnnnnnnnnnnnnnnnnnnnnnnnnnnnnnnnnnnnnnnnnnnnnnnnnnnnnnnnnnnnnnnnnnnnnnnnnnnnnnnnnnnnnnnnnnnnnnnnnnnnnnnnnnnnnnnnnnnnnnnnnnnnnnnnnnnnnnnnnnnnnnnnnnnnnnnnnnnnnnnnnnnnnnnnnnnnnnnnnnnnnnnnnnnnnnnnnnnnnnnnnnnnnnnnnnnnnnnnnnnnnnnnnnnnnnnnnnnnnnnnnnnnnnnnnnnnnnnnnnnnnnnnnnnnnnnnnnnnnnnnnnnnnnnnnnnnnnnnnnnnnnnnnnnnnnnnnnnnnnnnnnnnnnnnnnnnnnnnnnnnnnnnnnnnnnnnnnnnnnnnnnnnnnnnnnnnnnnnnnnnnnnnnnnnnnnnnnnnnnnnnnnnnnnnnnnnnnnnnnnnnnnnnnnnnnnnnnnnnnnnnnnnnnnnnnnnnnnnnnnnnnnnnnnnnnnnnnnnnnnnnnnnnnnnnnnnnnnnnnnnnnnnnnnnnnnnnnnnnnnnnnnnnnnnnnnnnnnnnnnnnnnnnnnnnnnnnnnnnnnnnnnnnnnnnnnnnnnnnnnnnnnnnnnnnnnnnnnnnnnnnnnnnnnnnnnnnnnnnnnnnnnnnnnnnnnnnnnnnnnnnnnnnnnnnnnnnnnnnnnnnnnnnnnnnnnnnnnnnnnnnnnnnnnnnnnnnnnnnnnnnnnnnnnnnnnnnnnnnnnnnnnnnnnnnnnnnnnnnnnnnnnnnnnnnnnnnnnnnnnnnnnnnnnnnnnnnnnnnnnnnnnnnnnnnnnnnnnnnnnnnnnnnnnnnnnnnnnnnnnnnnnnnnnnnnnnnnnnnnnnnnnnnnnnnnnnnnnnnnnnnnnnnnnnnnnnnnnnnnnnnnnnnnnnnnnnnnnnnnnnnnnnnnnnnnnnnnnnnnnnnnnnnnnnnnnnnnnnnnnnnnnnnnnnnnnnnnnnnnnnnnnnnnnnnnnnnnnnnnnnnnnnnnnnnnnnnnnnnnnnnnnnnnnnnnnnnnnnnnnnnnnnnnnnnnnnnnnnnnnnnnnnnnnnnnnnnnnnnnnnnnnnnnnnnnnnnnnnnnnnnnnnnnnnnnnnnnnnnnnnnnnnnnnnnnnnnnnnnnnnnnnnnnnnnnnnnnnnnnnnnnnnnnnnnnnnnnnnnnnnnnnnnnnnnnnnnnnnnnnnnnnnnnnnnnnnnnnnnnnnnnnnnnnnnnnnnnnnnnnnnnnnnnnnnnnnnnnnnnnnnnnnnnnnnnnnnnnnnnnnnnnnnnnnnnnnnnnnnnnnnnnnnnnnnnnnnnnnnnnnnnnnnnnnnnnnnnnnnnnnnnnnnnnnnnnnnnnnnnnnnnnnnnnnnnnnnnnnnnnnnnnnnnnnnnnnnnnnnnnnnnnnnnnnnnnnnnnnnnnnnnnnnnnnnnnnnnnnnnnnnnnnnnnnnnnnnnnnnnnnnnnnnnnnnnnnnnnnnnnnnnnnnnnnnnnnnnnnnnnnnnnnnnnnnnnnnnnnnnnnnnnnnnnnnnnnnnnnnnnnnnnnnnnnnnnnnnnnnnnnnnnnnnnnnnnnnnnnnnnnnnnnnnnnnnnnnnnnnnnnnnnnnnnnnnnnnnnnnnnnnnnnnnnnnnnnnnnnnnnnnnnnnnnnnnnnnnnnnnnnnnnnnnnnnnnnnnnnnnnnnnnnnnnnnnnnnnnnnnnnnnnnnnnnnnnnnnnnnnnnnnnnnnnnnnnnnnnnnnnnnnnnnnnnnnnnnnnnnnnnnnnnnnnnnnnnnnnnnnnnnnnnnnnnnnnnnnnnnnnnnnnnnnnnnnnnnnnnnnnnnnnnnnnnnnnnnnnnnnnnnnnnnnnnnnnnnnnnnnnnnnnnnnnnnnnnnnnnnnnnnnnnnnnnnnnnnnnnnnnnnnnnnnnnnnnnnnnnnnnnnnnnnnnnnnnnnnnnnnnnnnnnnnnnnnnnnnnnnnnnnnnnnnnnnnnnnnnnnnnnnnnnnnnnnnnnnnnnnnnnnnnnnnnnnnnnnnnnnnnnnnnnnnnnnnnnnnnnnnnnnnnnnnnnnnnnnnnnnnnnnnnnnnnnnnnnnnnnnnnnnnnnnnnnnnnnnnnnnnnnnnnnnnnnnnnnnnnnnnnnnnnnnnnnnnnnnnnnnnnnnnnnnnnnnnnnnnnnnnnnnnnnnnnnnnnnnnnnnnnnnnnnnnnnnnnnnnnnnnnnnnnnnnnnnnnnnnnnnnnnnnnnnnnnnnnnnnnnnnnnnnnnnnnnnnnnnnnnnnnnnnnnnnnnnnnnnnnnnnnnnnnnnnnnnnnnnnnnnnnnnnnnnnnnnnnnnnnnnnnnnnnnnnnnnnnnnnnnnnnnnnnnnnnnnnnnnnnnnnnnnnnnnnnnnnnnnnnnnnnnnnnnnnnnnnnnnnnnnnnnnnnnnnnnnnnnnnnnnnnnnnnnnnnnnnnnnnnnnnnnnnnnnnnnnnnnnnnnnnnnnnnnnnnnnnnnnnnnnnnnnnnnnnnnnnnnnnnnnnnnnnnnnnnnnnnnnnnnnnnnnnnnnnnnnnnnnnnnnnnnnnnnnnnnnnnnnnnnnnnnnnnnnnnnnnnnnnnnnnnnnnnnnnnnnnnnnnnnnnnnnnnnnnnnnnnnnnnnnnnnnnnnnnnnnnnnnnnnnnnnnnnnnnnnnnnnnnnnnnnnnnnnnnnnnnnnnnnnnnnnnnnnnnnnnnnnnnnnnnnnnnnnnnnnnnnnnnnnnnnnnnnnnnnnnnnnnnnnnnnnnnnnnnnnnnnnnnnnnnnnnnnnnnnnnnnnnnnnnnnnnnnnnnnnnnnnnnnnnnnnnnnnnnnnnnnnnnnnnnnnnnnnnnnnnnnnnnnnnnnnnnnnnnnnnnnnnnnnnnnnnnnnnnnnnnnnnnnnnnnnnnnnnnnnnnnnnnnnnnnnnnnnnnnnnnnnnnnnnnnnnnnnnnnnnnnnnnnnnnnnnnnnnnnnnnnnnnnnnnnnnnnnnnnnnnnnnnnnnnnnnnnnnnnnnnnnnnnnnnnnnnnnnnnnnnnnnnnnnnnnnnnnnnnnnnnnnnnnnnnnnnnnnnnnnnnnnnnnnnnnnnnnnnnnnnnnnnnnnnnnnnnnnnnnnnnnnnnnnnnnnnnnnnnnnnnnnnnnnnnnnnnnnnnnnnnnnnnnnnnnnnnnnnnnnnnnnnnnnnnnnnnnnnnnnnnnnnnnnnnnnnnnnnnnnnnnnnnnnnnnnnnnnnnnnnnnnnnnnnnnnnnnnnnnnnnnnnnnnnnnnnnnnnnnnnnnnnnnnnnnnnnnnnnnnnnnnnnnnnnnnnnnnnnnnnnnnnnnnnnnnnnnnnnnnnnnnnnnnnnnnnnnnnnnnnnnnnnnnnnnnnnnnnnnnnnnnnnnnnnnnnnnnnnnnnnnnnnnnnnnnnnnnnnnnnnnnnnnnnnnnnnnnnnnnnnnnnnnnnnnnnnnnnnnnnnnnnnnnnnnnnnnnnnnnnnnnnnnnnnnnnnnnnnnnnnnnnnnnnnnnnnnnnnnnnnnnnnnnnnnnnnnnnnnnnnnnnnnnnnnnnnnnnnnnnnnnnnnnnnnnnnnnnnnnnnnnnnnnnnnnnnnnnnnnnnnnnnnnnnnnnnnnnnnnnnnnnnnnnnnnnnnnnnnnnnnnnnnnnnnnnnnnnnnnnnnnnnnnnnnnnnnnnnnnnnnnnnnnnnnnnnnnnnnnnnnnnnnnnnnnnnnnnnnnnnnnnnnnnnnnnnnnnnnnnnnnnnnnnnnnnnnnnnnnnnnnnnnnnnnnnnnnnnnnnnnnnnnnnnnnnnnnnnnnnnnnnnnnnnnnnnnnnnnnnnnnnnnnnnnnnnnnnnnnnnnnnnnnnnnnnnnnnnnnnnnnnnnnnnnnnnnnnnnnnnnnnnnnnnnnnnnnnnnnnnnnnnnnnnnnnnnnnnnnnnnnnnnnnnnnnnnnnnnnnnnnnnnnnnnnnnnnnnnnnnnnnnnnnnnnnnnnnnnnnnnnnnnnnnnnnnnnnnnnnnnnnnnnnnnnnnnnnnnnnnnnnnnnnnnnnnnnnnnnnnnnnnnnnnnnnnnnnnnnnnnnnnnnnnnnnnnnnnnnnnnnnnnnnnnnnnnnnnnnnnnnnnnnnnnnnnnnnnnnnnnnnnnnnnnnnnnnnnnnnnnnnnnnnnnnnnnnnnnnnnnnnnnnnnnnnnnnnnnnnnnnnnnnnnnnnnnnnnnnnnnnnnnnnnnnnnnnnnnnnnnnnnnnnnnnnnnnnnnnnnnnnnnnnnnnnnnnnnnnnnnnnnnnnnnnnnnnnnnnnnnnnnnnnnnnnnnnnnnnnnnnnnnnnnnnnnnnnnnnnnnnnnnnnnnnnnnnnnnnnnnnnnnnnnnnnnnnnnnnnnnnnnnnnnnnnnnnnnnnnnnnnnnnnnnnnnnnnnnnnnnnnnnnnnnnnnnnnnnnnnnnnnnnnnnnnnnnnnnnnnnnnnnnnnnnnnnnnnnnnnnnnnnnnnnnnnnnnnnnnnnnnnnnnnnnnnnnnnnnnnnnnnnnnnnnnnnnnnnnnnnnnnnnnnnnnnnnnnnnnnnnnnnnnnnnnnnnnnnnnnnnnnnnnnnnnnnnnnnnnnnnnnnnnnnnnnnnnnnnnnnnnnnnnnnnnnnnnnnnnnnnnnnnnnnnnnnnnnnnnnnnnnnnnnnnnnnnnnnnnnnnnnnnnnnnnnnnnnnnnnnnnnnnnnnnnnnnnnnnnnnnnnnnnnnnnnnnnnnnnnnnnnnnnnnnnnnnnnnnnnnnnnnnnnnnnnnnnnnnnnnnnnnnnnnnnnnnnnnnnnnnnnnnnnnnnnnnnnnnnnnnnnnnnnnnnnnnnnnnnnnnnnnnnnnnnnnnnnnnnnnnnnnnnnnnnnnnnnnnnnnnnnnnnnnnnnnnnnnnnnnnnnnnnnnnnnnnnnnnnnnnnnnnnnnnnnnnnnnnnnnnnnnnnnnnnnnnnnnnnnnnnnnnnnnnnnnnnnnnnnnnnnnnnnnnnnnnnnnnnnnnnnnnnnnnnnnnnnnnnnnnnnnnnnnnnnnnnnnnnnnnnnnnnnnnnnnnnnnnnnnnnnnnnnnnnnnnnnnnnnnnnnnnnnnnnnnnnnnnnnnnnnnnnnnnnnnnnnnnnnnnnnnnnnnnnnnnnnnnnnnnnnnnnnnnnnnnnnnnnnnnnnnnnnnnnnnnnnnnnnnnnnnnnnnnnnnnnnnnnnnnnnnnnnnnnnnnnnnnnnnnnnnnnnnnnnnnnnnnnnnnnnnnnnnnnnnnnnnnnnnnnnnnnnnnnnnnnnnnnnnnnnnnnnnnnnnnnnnnnnnnnnnnnnnnnnnnnnnnnnnnnnnnnnnnnnnnnnnnnnnnnnnnnnnnnnnnnnnnnnnnnnnnnnnnnnnnnnnnnnnnnnnnnnnnnnnnnnnnnnnnnnnnnnnnnnnnnnnnnnnnnnnnnnnnnnnnnnnnnnnnnnnnnnnnnnnnnnnnnnnnnnnnnnnnnnnnnnnnnnnnnnnnnnnnnnnnnnnnnnnnnnnnnnnnnnnnnnnnnnnnnnnnnnnnnnnnnnnnnnnnnnnnnnnnnnnnnnnnnnnnnnnnnnnnnnnnnnnnnnnnnnnnnnnnnnnnnnnnnnnnnnnnnnnnnnnnnnnnnnnnnnnnnnnnnnnnnnnnnnnnnnnnnnnnnnnnnnnnnnnnnnnnnnnnnnnnnnnnnnnnnnnnnnnnnnnnnnnnnnnnnnnnnnnnnnnnnnnnnnnnnnnnnnnnnnnnnnnnnnnnnnnnnnnnnnnnnnnnnnnnnnnnnnnnnnnnnnnnnnnnnnnnnnnnnnnnnnnnnnnnnnnnnnnnnnnnnnnnnnnnnnnnnnnnnnnnnnnnnnnnnnnnnnnnnnnnnnnnnnnnnnnnnnnnnnnnnnnnnnnnnnnnnnnnnnnnnnnnnnnnnnnnnnnnnnnnnnnnnnnnnnnnnnnnnnnnnnnnnnnnnnnnnnnnnnnnnnnnnnnnnnnnnnnnnnnnnnnnnnnnnnnnnnnnnnnnnnnnnnnnnnnnnnnnnnnnnnnnnnnnnnnnnnnnnnnnnnnnnnnnnnnnnnnnnnnnnnnnnnnnnnnnnnnnnnnnnnnnnnnnnnnnnnnnnnnnnnnnnnnnnnnnnnnnnnnnnnnnnnnnnnnnnnnnnnnnnnnnnnnnnnnnnnnnnnnnnnnnnnnnnnnnnnnnnnnnnnnnnnnnnnnnnnnnnnnnnnnnnnnnnnnnnnnnnnnnnnnnnnnnnnnnnnnnnnnnnnnnnnnnnnnnnnnnnnnnnnnnnnnnnnnnnnnnnnnnnnnnnnnnnnnnnnnnnnnnnnnnnnnnnnnnnnnnnnnnnnnnnnnnnnnnnnnnnnnnnnnnnnnnnnnnnnnnnnnnnnnnnnnnnnnnnnnnnnnnnnnnnnnnnnnnnnnnnnnnnnnnnnnnnnnnnnnnnnnnnnnnnnnnnnnnnnnnnnnnnnnnnnnnnnnnnnnnnnnnnnnnnnnnnnnnnnnnnnnnnnnnnnnnnnnnnnnnnnnnnnnnnnnnnnnnnnnnnnnnnnnnnnnnnnnnnnnnnnnnnnnnnnnnnnnnnnnnnnnnnnnnnnnnnnnnnnnnnnnnnnnnnnnnnnnnnnnnnnnnnnnnnnnnnnnnnnnnnnnnnnnnnnnnnnnnnnnnnnnnnnnnnnnnnnnnnnnnnnnnnnnnnnnnnnnnnnnnnnnnnnnnnnnnnnnnnnnnnnnnnnnnnnnnnnnnnnnnnnnnnnnnnnnnnnnnnnnnnnnnnnnnnnnnnnnnnnnnnnnnnnnnnnnnnnnnnnnnnnnnnnnnnnnnnnnnnnnnnnnnnnnnnnnnnnnnnnnnnnnnnnnnnnnnnnnnnnnnnnnnnnnnnnnnnnnnnnnnnnnnnnnnnnnnnnnnnnnnnnnnnnnnnnnnnnnnnnnnnnnnnnnnnnnnnnnnnnnnnnnnnnnnnnnnnnnnnnnnnnnnnnnnnnnnnnnnnnnnnnnnnnnnnnnnnnnnnnnnnnnnnnnnnnnnnnnnnnnnnnnnnnnnnnnnnnnnnnnnnnnnnnnnnnnnnnnnnnnnnnnnnnnnnnnnnnnnnnnnnnnnnnnnnnnnnnnnnnnnnnnnnnnnnnnnnnnnnnnnnnnnnnnnnnnnnnnnnnnnnnnnnnnnnnnnnnnnnnnnnnnnnnnnnnnnnnnnnnnnnnnnnnnnnnnnnnnnnnnnnnnnnnnnnnnnnnnnnnnnnnnnnnnnnnnnnnnnnnnnnnnnnnnnnnnnnnnnnnnnnnnnnnnnnnnnnnnnnnnnnnnnnnnnnnnnnnnnnnnnnnnnnnnnnnnnnnnnnnnnnnnnnnnnnnnnnnnnnnnnnnnnnnnnnnnnnnnnnnnnnnnnnnnnnnnnnnnnnnnnnnnnnnnnnnnnnnnnnnnnnnnnnnnnnnnnnnnnnnnnnnnnnnnnnnnnnnnnnnnnnnnnnnnnnnnnnnnnnnnnnnnnnnnnnnnnnnnnnnnnnnnnnnnnnnnnnnnnnnnnnnnnnnnnnnnnnnnnnnnnnnnnnnnnnnnnnnnnnnnnnnnnnnnnnnnnnnnnnnnnnnnnnnnnnnnnnnnnnnnnnnnnnnnnnnnnnnnnnnnnnnnnnnnnnnnnnnnnnnnnnnnnnnnnnnnnnnnnnnnnnnnnnnnnnnnnnnnnnnnnnnnnnnnnnnnnnnnnnnnnnnnnnnnnnnnnnnnnnnnnnnnnnnnnnnnnnnnnnnnnnnnnnnnnnnnnnnnnnnnnnnnnnnnnnnnnnnnnnnnnnnnnnnnnnnnnnnnnnnnnnnnnnnnnnnnnnnnnnnnnnnnnnnnnnnnnnnnnnnnnnnnnnnnnnnnnnnnnnnnnnnnnnnnnnnnnnnnnnnnnnnnnnnnnnnnnnnnnnnnnnnnnnnnnnnnnnnnnnnnnnnnnnnnnnnnnnnnnnnnnnnnnnnnnnnnnnnnnnnnnnnnnnnnnnnnnnnnnnnnnnnnnnnnnnnnnnnnnnnnnnnnnnnnnnnnnnnnnnnnnnnnnnnnnnnnnnnnnnnnnnnnnnnnnnnnnnnnnnnnnnnnnnnnnnnnnnnnnnnnnnnnnnnnnnnnnnnnnnnnnnnnnnnnnnnnnnnnnnnnnnnnnnnnnnnnnnnnnnnnnnnnnnnnnnnnnnnnnnnnnnnnnnnnnnnnnnnnnnnnnnnnnnnnnnnnnnnnnnnnnnnnnnnnnnnnnnnnnnnnnnnnnnnnnnnnnnnnnnnnnnnnnnnnnnnnnnnnnnnnnnnnnnnnnnnnnnnnnnnnnnnnnnnnnnnnnnnnnnnnnnnnnnnnnnnnnnnnnnnnnnnnnnnnnnnnnnnnnnnnnnnnnnnnnnnnnnnnnnnnnnnnnnnnnnnnnnnnnnnnnnnnnnnnnnnnnnnnnnnnnnnnnnnnnnnnnnnnnnnnnnnnnnnnnnnnnnnnnnnnnnnnnnnnnnnnnnnnnnnnnnnnnnnnnnnnnnnnnnnnnnnnnnnnnnnnnnnnnnnnnnnnnnnnnnnnnnnnnnnnnnnnnnnnnnnnnnnnnnnnnnnnnnnnnnnnnnnnnnnnnnnnnnnnnnnnnnnnnnnnnnnnnnnnnnnnnnnnnnnnnnnnnnnnnnnnnnnnnnnnnnnnnnnnnnnnnnnnnnnnnnnnnnnnnnnnnnnnnnnnnnnnnnnnnnnnnnnnnnnnnnnnnnnnnnnnnnnnnnnnnnnnnnnnnnnnnnnnnnnnnnnnnnnnnnnnnnnnnnnnnnnnnnnnnnnnnnnnnnnnnnnnnnnnnnnnnnnnnnnnnnnnnnnnnnnnnnnnnnnnnnnnnnnnnnnnnnnnnnnnnnnnnnnnnnnnnnnnnnnnnnnnnnnnnnnnnnnnnnnnnnnnnnnnnnnnnnnnnnnnnnnnnnnnnnnnnnnnnnnnnnnnnnnnnnnnnnnnnnnnnnnnnnnnnnnnnnnnnnnnnnnnnnnnnnnnnnnnnnnnnnnnnnnnnnnnnnnnnnnnnnnnnnnnnnnnnnnnnnnnnnnnnnnnnnnnnnnnnnnnnnnnnnnnnnnnnnnnnnnnnnnnnnnnnnnnnnnnnnnnnnnnnnnnnnnnnnnnnnnnnnnnnnnnnnnnnnnnnnnnnnnnnnnnnnnnnnnnnnnnnnnnnnnnnnnnnnnnnnnnnnnnnnnnnnnnnnnnnnnnnnnnnnnnnnnnnnnnnnnnnnnnnnnnnnnnnnnnnnnnnnnnnnnnnnnnnnnnnnnnnnnnnnnnnnnnnnnnnnnnnnnnnnnnnnnnnnnnnnnnnnnnnnnnnnnnnnnnnnnnnnnnnnnnnnnnnnnnnnnnnnnnnnnnnnnnnnnnnnnnnnnnnnnnnnnnnnnnnnnnnnnnnnnnnnnnnnnnnnnnnnnnnnnnnnnnnnnnnnnnnnnnnnnnnnnnnnnnnnnnnnnnnnnnnnnnnnnnnnnnnnnnnnnnnnnnnnnnnnnnnnnnnnnnnnnnnnnnnnnnnnnnnnnnnnnnnnnnnnnnnnnnnnnnnnnnnnnnnnnnnnnnnnnnnnnnnnnnnnnnnnnnnnnnnnnnnnnnnnnnnnnnnnnnnnnnnnnnnnnnnnnnnnnnnnnnnnnnnnnnnnnnnnnnnnnnnnnnnnnnnnnnnnnnnnnnnnnnnnnnnnnnnnnnnnnnnnnnnnnnnnnnnnnnnnnnnnnnnnnnnnnnnnnnnnnnnnnnnnnnnnnnnnnnnnnnnnnnnnnnnnnnnnnnnnnnnnnnnnnnnnnnnnnnnnnnnnnnnnnnnnnnnnnnnnnnnnnnnnnnnnnnnnnnnnnnnnnnnnnnnnnnnnnnnnnnnnnnnnnnnnnnnnnnnnnnnnnnnnnnnnnnnnnnnnnnnnnnnnnnnnnnnnnnnnnnnnnnnnnnnnnnnnnnnnnnnnnnnnnnnnnnnnnnnnnnnnnnnnnnnnnnnnnnnnnnnnnnnnnnnnnnnnnnnnnnnnnnnnnnnnnnnnnnnnnnnnnnnnnnnnnnnnnnnnnnnnnnnnnnnnnnnnnnnnnnnnnnnnnnnnnnnnnnnnnnnnnnnnnnnnnnnnnnnnnnnnnnnnnnnnnnnnnnnnnnnnnnnnnnnnnnnnnnnnnnnnnnnnnnnnnnnnnnnnnnnnnnnnnnnnnnnnnnnnnnnnnnnnnnnnnnnnnnnnnnnnnnnnnnnnnnnnnnnnnnnnnnnnnnnnnnnnnnnnnnnnnnnnnnnnnnnnnnnnnnnnnnnnnnnnnnnnnnnnnnnnnnnnnnnnnnnnnnnnnnnnnnnnnnnnnnnnnnnnnnnnnnnnnnnnnnnnnnnnnnnnnnnnnnnnnnnnnnnnnnnnnnnnnnnnnnnnnnnnnnnnnnnnnnnnnnnnnnnnnnnnnnnnnnnnnnnnnnnnnnnnnnnnnnnnnnnnnnnnnnnnnnnnnnnnnnnnnnnnnnnnnnnnnnnnnnnnnnnnnnnnnnnnnnnnnnnnnnnnnnnnnnnnnnnnnnnnnnnnnnnnnnnnnnnnnnnnnnnnnnnnnnnnnnnnnnnnnnnnnnnnnnnnnnnnnnnnnnnnnnnnnnnnnnnnnnnnnnnnnnnnnnnnnnnnnnnnnnnnnnnnnnnnnnnnnnnnnnnnnnnnnnnnnnnnnnnnnnnnnnnnnnnnnnnnnnnnnnnnnnnnnnnnnnnnnnnnnnnnnnnnnnnnnnnnnnnnnnnnnnnnnnnnnnnnnnnnnnnnnnnnnnnnnnnnnnnnnnnnnnnnnnnnnnnnnnnnnnnnnnnnnnnnnnnnnnnnnnnnnnnnnnnnnnnnnnnnnnnnnnnnnnnnnnnnnnnnnnnnnnnnnnnnnnnnnnnnnnnnnnnnnnnnnnnnnnnnnnnnnnnnnnnnnnnnnnnnnnnnnnnnnnnnnnnnnnnnnnnnnnnnnnnnnnnnnnnnnnnnnnnnnnnnnnnnnnnnnnnnnnnnnnnnnnnnnnnnnnnnnnnnnnnnnnnnnnnnnnnnnnnnnnnnnnnnnnnnnnnnnnnnnnnnnnnnnnnnnnnnnnnnnnnnnnnnnnnnnnnnnnnnnnnnnnnnnnnnnnnnnnnnnnnnnnnnnnnnnnnnnnnnnnnnnnnnnnnnnnnnnnnnnnnnnnnnnnnnnnnnnnnnnnnnnnnnnnnnnnnnnnnnnnnnnnnnnnnnnnnnnnnnnnnnnnnnnnnnnnnnnnnnnnnnnnnnnnnnnnnnnnnnnnnnnnnnnnnnnnnnnnnnnnnnnnnnnnnnnnnnnnnnnnnnnnnnnnnnnnnnnnnnnnnnnnnnnnnnnnnnnnnnnnnnnnnnnnnnnnnnnnnnnnnnnnnnnnnnnnnnnnnnnnnnnnnnnnnnnnnnnnnnnnnnnnnnnnnnnnnnnnnnnnnnnnnnnnnnnnnnnnnnnnnnnnnnnnnnnnnnnnnnnnnnnnnnnnnnnnnnnnnnnnnnnnnnnnnnnnnnnnnnnnnnnnnnnnnnnnnnnnnnnnnnnnnnnnnnnnnnnnnnnnnnnnnnnnnnnnnnnnnnnnnnnnnnnnnnnnnnnnnnnnnnnnnnnnnnnnnnnnnnnnnnnnnnnnnnnnnnnnnnnnnnnnnnnnnnnnnnnnnnnnnnnnnnnnnnnnnnnnnnnnnnnnnnnnnnnnnnnnnnnnnnnnnnnnnnnnnnnnnnnnnnnnnnnnnnnnnnnnnnnnnnnnnnnnnnnnnnnnnnnnnnnnnnnnnnnnnnnnnnnnnnnnnnnnnnnnnnnnnnnnnnnnnnnnnnnnnnnnnnnnnnnnnnnnnnnnnnnnnnnnnnnnnnnnnnnnnnnnnnnnnnnnnnnnnnnnnnnnnnnnnnnnnnnnnnnnnnnnnnnnnnnnnnnnnnnnnnnnnnnnnnnnnnnnnnnnnnnnnnnnnnnnnnnnnnnnnnnnnnnnnnnnnnnnnnnnnnnnnnnnnnnnnnnnnnnnnnnnnnnnnnnnnnnnnnnnnnnnnnnnnnnnnnnnnnnnnnnnnnnnnnnnnnnnnnnnnnnnnnnnnnnnnnnnnnnnnnnnnnnnnnnnnnnnnnnnnnnnnnnnnnnnnnnnnnnnnnnnnnnnnnnnnnnnnnnnnnnnnnnnnnnnnnnnnnnnnnnnnnnnnnnnnnnnnnnnnnnnnnnnnnnnnnnnnnnnnnnnnnnnnnnnnnnnnnnnnnnnnnnnnnnnnnnnnnnnnnnnnnnnnnnnnnnnnnnnnnnnnnnnnnnnnnnnnnnnnnnnnnnnnnnnnnnnnnnnnnnnnnnnnnnnnnnnnnnnnnnnnnnnnnnnnnnnnnnnnnnnnnnnnnnnnnnnnnnnnnnnnnnnnnnnnnnnnnnnnnnnnnnnnnnnnnnnnnnnnnnnnnnnnnnnnnnnnnnnnnnnnnnnnnnnnnnnnnnnnnnnnnnnnnnnnnnnnnnnnnnnnnnnnnnnnnnnnnnnnnnnnnnnnnnnnnnnnnnnnnnnnnnnnnnnnnnnnnnnnnnnnnnnnnnnnnnnnnnnnnnnnnnnnnnnnnnnnnnnnnnnnnnnnnnnnnnnnnnnnnnnnnnnnnnnnnnnnnnnnnnnnnnnnnnnnnnnnnnnnnnnnnnnnnnnnnnnnnnnnnnnnnnnnnnnnnnnnnnnnnnnnnnnnnnnnnnnnnnnnnnnnnnnnnnnnnnnnnnnnnnnnnnnnnnnnnnnnnnnnnnnnnnnnnnnnnnnnnnnnnnnnnnnnnnnnnnnnnnnnnnnnnnnnnnnnnnnnnnnnnnnnnnnnnnnnnnnnnnnnnnnnnnnnnnnnnnnnnnnnnnnnnnnnnnnnnnnnnnnnnnnnnnnnnnnnnnnnnnnnnnnnnnnnnnnnnnnnnnnnnnnnnnnnnnnnnnnnnnnnnnnnnnnnnnnnnnnnnnnnnnnnnnnnnnnnnnnnnnnnnnnnnnnnnnnnnnnnnnnnnnnnnnnnnnnnnnnnnnnnnnnnnnnnnnnnnnnnnnnnnnnnnnnnnnnnnnnnnnnnnnnnnnnnnnnnnnnnnnnnnnnnnnnnnnnnnnnnnnnnnnnnnnnnnnnnnnnnnnnnnnnnnnnnnnnnnnnnnnnnnnnnnnnnnnnnnnnnnnnnnnnnnnnnnnnnnnnnnnnnnnnnnnnnnnnnnnnnnnnnnnnnnnnnnnnnnnnnnnnnnnnnnnnnnnnnnnnnnnnnnnnnnnnnnnnnnnnnnnnnnnnnnnnnnnnnnnnnnnnnnnnnnnnnnnnnnnnnnnnnnnnnnnnnnnnnnnnnnnnnnnnnnnnnnnnnnnnnnnnnnnnnnnnnnnnnnnnnnnnnnnnnnnnnnnnnnnnnnnnnnnnnnnnnnnnnnnnnnnnnnnnnnnnnnnnnnnnnnnnnnnnnnnnnnnnnnnnnnnnnnnnnnnnnnnnnnnnnnnnnnnnnnnnnnnnnnnnnnnnnnnnnnnnnnnnnnnnnnnnnnnnnnnnnnnnnnnnnnnnnnnnnnnnnnnnnnnnnnnnnnnnnnnnnnnnnnnnnnnnnnnnnnnnnnnnnnnnnnnnnnnnnnnnnnnnnnnnnnnnnnnnnnnnnnnnnnnnnnnnnnnnnnnnnnnnnnnnnnnnnnnnnnnnnnnnnnnnnnnnnnnnnnnnnnnnnnnnnnnnnnnnnnnnnnnnnnnnnnnnnnnnnnnnnnnnnnnnnnnnnnnnnnnnnnnnnnnnnnnnnnnnnnnnnnnnnnnnnnnnnnnnnnnnnnnnnnnnnnnnnnnnnnnnnnnnnnnnnnnnnnnnnnnnnnnnnnnnnnnnnnnnnnnnnnnnnnnnnnnnnnnnnnnnnnnnnnnnnnnnnnnnnnnnnnnnnnnnnnnnnnnnnnnnnnnnnnnnnnnnnnnnnnnnnnnnnnnnnnnnnnnnnnnnnnnnnnnnnnnnnnnnnnnnnnnnnnnnnnnnnnnnnnnnnnnnnnnnnnnnnnnnnnnnnnnnnnnnnnnnnnnnnnnnnnnnnnnnnnnnnnnnnnnnnnnnnnnnnnnnnnnnnnnnnnnnnnnnnnnnnnnnnnnnnnnnnnnnnnnnnnnnnnnnnnnnnnnnnnnnnnnnnnnnnnnnnnnnnnnnnnnnnnnnnnnnnnnnnnnnnnnnnnnnnnnnnnnnnnnnnnnnnnnnnnnnnnnnnnnnnnnnnnnnnnnnnnnnnnnnnnnnnnnnnnnnnnnnnnnnnnnnnnnnnnnnnnnnnnnnnnnnnnnnnnnnnnnnnnnnnnnnnnnnnnnnnnnnnnnnnnnnnnnnnnnnnnnnnnnnnnnnnnnnnnnnnnnnnnnnnnnnnnnnnnnnnnnnnnnnnnnnnnnnnnnnnnnnnnnnnnnnnnnnnnnnnnnnnnnnnnnnnnnnnnnnnnnnnnnnnnnnnnnnnnnnnnnnnnnnnnnnnnnnnnnnnnnnnnnnnnnnnnnnnnnnnnnnnnnnnnnnnnnnnnnnnnnnnnnnnnnnnnnnnnnnnnnnnnnnnnnnnnnnnnnnnnnnnnnnnnnnnnnnnnnnnnnnnnnnnnnnnnnnnnnnnnnnnnnnnnnnnnnnnnnnnnnnnnnnnnnnnnnnnnnnnnnnnnnnnnnnnnnnnnnnnnnnnnnnnnnnnnnnnnnnnnnnnnnnnnnnnnnnnnnnnnnnnnnnnnnnnnnnnnnnnnnnnnnnnnnnnnnnnnnnnnnnnnnnnnnnnnnnnnnnnnnnnnnnnnnnnnnnnnnnnnnnnnnnnnnnnnnnnnnnnnnnnnnnnnnnnnnnnnnnnnnnnnnnnnnnnnnnnnnnnnnnnnnnnnnnnnnnnnnnnnnnnnnnnnnnnnnnnnnnnnnnnnnnnnnnnnnnnnnnnnnnnnnnnnnnnnnnnnnnnnnnnnnnnnnnnnnnnnnnnnnnnnnnnnnnnnnnnnnnnnnnnnnnnnnnnnnnnnnnnnnnnnnnnnnnnnnnnnnnnnnnnnnnnnnnnnnnnnnnnnnnnnnnnnnnnnnnnnnnnnnnnnnnnnnnnnnnnnnnnnnnnnnnnnnnnnnnnnnnnnnnnnnnnnnnnnnnnnnnnnnnnnnnnnnnnnnnnnnnnnnnnnnnnnnnnnnnnnnnnnnnnnnnnnnnnnnnnnnnnnnnnnnnnnnnnnnnnnnnnnnnnnnnnnnnnnnnnnnnnnnnnnnnnnnnnnnnnnnnnnnnnnnnnnnnnnnnnnnnnnnnnnnnnnnnnnnnnnnnnnnnnnnnnnnnnnnnnnnnnnnnnnnnnnnnnnnnnnnnnnnnnnnnnnnnnnnnnnnnnnnnnnnnnnnnnnnnnnnnnnnnnnnnnnnnnnnnnnnnnnnnnnnnnnnnnnnnnnnnnnnnnnnnnnnnnnnnnnnnnnnnnnnnnnnnnnnnnnnnnnnnnnnnnnnnnnnnnnnnnnnnnnnnnnnnnnnnnnnnnnnnnnnnnnnnnnnnnnnnnnnnnnnnnnnnnnnnnnnnnnnnnnnnnnnnnnnnnnnnnnnnnnnnnnnnnnnnnnnnnnnnnnnnnnnnnnnnnnnnnnnnnnnnnnnnnnnnnnnnnnnnnnnnnnnnnnnnnnnnnnnnnnnnnnnnnnnnnnnnnnnnnnnnnnnnnnnnnnnnnnnnnnnnnnnnnnnnnnnnnnnnnnnnnnnnnnnnnnnnnnnnnnnnnnnnnnnnnnnnnnnnnnnnnnnnnnnnnnnnnnnnnnnnnnnnnnnnnnnnnnnnnnnnnnnnnnnnnnnnnnnnnnnnnnnnnnnnnnnnnnnnnnnnnnnnnnnnnnnnnnnnnnnnnnnnnnnnnnnnnnnnnnnnnnnnnnnnnnnnnnnnnnnnnnnnnnnnnnnnnnnnnnnnnnnnnnnnnnnnnnnnnnnnnnnnnnnnnnnnnnnnnnnnnnnnnnnnnnnnnnnnnnnnnnnnnnnnnnnnnnnnnnnnnnnnnnnnnnnnnnnnnnnnnnnnnnnnnnnnnnnnnnnnnnnnnnnnnnnnnnnnnnnnnnnnnnnnnnnnnnnnnnnnnnnnnnnnnnnnnnnnnnnnnnnnnnnnnnnnnnnnnnnnnnnnnnnnnnnnnnnnnnnnnnnnnnnnnnnnnnnnnnnnnnnnnnnnnnnnnnnnnnnnnnnnnnnnnnnnnnnnnnnnnnnnnnnnnnnnnnnnnnnnnnnnnnnnnnnnnnnnnnnnnnnnnnnnnnnnnnnnnnnnnnnnnnnnnnnnnnnnnnnnnnnnnnnnnnnnnnnnnnnnnnnnnnnnnnnnnnnnnnnnnnnnnnnnnnnnnnnnnnnnnnnnnnnnnnnnnnnnnnnnnnnnnnnnnnnnnnnnnnnnnnnnnnnnnnnnnnnnnnnnnnnnnnnnnnnnnnnnnnnnnnnnnnnnnnnnnnnnnnnnnnnnnnnnnnnnnnnnnnnnnnnnnnnnnnnnnnnnnnnnnnnnnnnnnnnnnnnnnnnnnnnnnnnnnnnnnnnnnnnnnnnnnnnnnnnnnnnnnnnnnnnnnnnnnnnnnnnnnnnnnnnnnnnnnnnnnnnnnnnnnnnnnnnnnnnnnnnnnnnnnnnnnnnnnnnnnnnnnnnnnnnnnnnnnnnnnnnnnnnnnnnnnnnnnnnnnnnnnnnnnnnnnnnnnnnnnnnnnnnnnnnnnnnnnnnnnnnnnnnnnnnnnnnnnnnnnnnnnnnnnnnnnnnnnnnnnnnnnnnnnnnnnnnnnnnnnnnnnnnnnnnnnnnnnnnnnnnnnnnnnnnnnnnnnnnnnnnnnnnnnnnnnnnnnnnnnnnnnnnnnnnnnnnnnnnnnnnnnnnnnnnnnnnnnnnnnnnnnnnnnnnnnnnnnnnnnnnnnnnnnnnnnnnnnnnnnnnnnnnnnnnnnnnnnnnnnnnnnnnnnnnnnnnnnnnnnnnnnnnnnnnnnnnnnnnnnnnnnnnnnnnnnnnnnnnnnnnnnnnnnnnnnnnnnnnnnnnnnnnnnnnnnnnnnnnnnnnnnnnnnnnnnnnnnnnnnnnnnnnnnnnnnnnnnnnnnnnnnnnnnnnnnnnnnnnnnnnnnnnnnnnnnnnnnnnnnnnnnnnnnnnnnnnnnnnnnnnnnnnnnnnnnnnnnnnnnnnnnnnnnnnnnnnnnnnnnnnnnnnnnnnnnnnnnnnnnnnnnnnnnnnnnnnnnnnnnnnnnnnnnnnnnnnnnnnnnnnnnnnnnnnnnnnnnnnnnnnnnnnnnnnnnnnnnnnnnnnnnnnnnnnnnnnnnnnnnnnnnnnnnnnnnnnnnnnnnnnnnnnnnnnnnnnnnnnnnnnnnnnnnnnnnnnnnnnnnnnnnnnnnnnnnnnnnnnnnnnnnnnnnnnnnnnnnnnnnnnnnnnnnnnnnnnnnnnnnnnnnnnnnnnnnnnnnnnnnnnnnnnnnnnnnnnnnnnnnnnnnnnnnnnnnnnnnnnnnnnnnnnnnnnnnnnnnnnnnnnnnnnnnnnnnnnnnnnnnnnnnnnnnnnnnnnnnnnnnnnnnnnnnnnnnnnnnnnnnnnnnnnnnnnnnnnnnnnnnnnnnnnnnnnnnnnnnnnnnnnnnnnnnnnnnnnnnnnnnnnnnnnnnnnnnnnnnnnnnnnnnnnnnnnnnnnnnnnnnnnnnnnnnnnnnnnnnnnnnnnnnnnnnnnnnnnnnnnnnnnnnnnnnnnnnnnnnnnnnnnnnnnnnnnnnnnnnnnnnnnnnnnnnnnnnnnnnnnnnnnnnnnnnnnnnnnnnnnnnnnnnnnnnnnnnnnnnnnnnnnnnnnnnnnnnnnnnnnnnnnnnnnnnnnnnnnnnnnnnnnnnnnnnnnnnnnnnnnnnnnnnnnnnnnnnnnnnnnnnnnnnnnnnnnnnnnnnnnnnnnnnnnnnnnnnnnnnnnnnnnnnnnnnnnnnnnnnnnnnnnnnnnnnnnnnnnnnnnnnnnnnnnnnnnnnnnnnnnnnnnnnnnnnnnnnnnnnnnnnnnnnnnnnnnnnnnnnnnnnnnnnnnnnnnnnnnnnnnnnnnnnnnnnnnnnnnnnnnnnnnnnnnnnnnnnnnnnnnnnnnnnnnnnnnnnnnnnnnnnnnnnnnnnnnnnnnnnnnnnnnnnnnnnnnnnnnnnnnnnnnnnnnnnnnnnnnnnnnnnnnnnnnnnnnnnnnnnnnnnnnnnnnnnnnnnnnnnnnnnnnnnnnnnnnnnnnnnnnnnnnnnnnnnnnnnnnnnnnnnnnnnnnnnnnnnnnnnnnnnnnnnnnnnnnnnnnnnnnnnnnnnnnnnnnnnnnnnnnnnnnnnnnnnnnnnnnnnnnnnnnnnnnnnnnnnnnnnnnnnnnnnnnnnnnnnnnnnnnnnnnnnnnnnnnnnnnnnnnnnnnnnnnnnnnnnnnnnnnnnnnnnnnnnnnnnnnnnnnnnnnnnnnnnnnnnnnnnnnnnnnnnnnnnnnnnnnnnnnnnnnnnnnnnnnnnnnnnnnnnnnnnnnnnnnnnnnnnnnnnnnnnnnnnnnnnnnnnnnnnnnnnnnnnnnnnnnnnnnnnnnnnnnnnnnnnnnnnnnnnnnnnnnnnnnnnnnnnnnnnnnnnnnnnnnnnnnnnnnnnnnnnnnnnnnnnnnnnnnnnnnnnnnnnnnnnnnnnnnnnnnnnnnnnnnnnnnnnnnnnnnnnnnnnnnnnnnnnnnnnnnnnnnnnnnnnnnnnnnnnnnnnnnnnnnnnnnnnnnnnnnnnnnnnnnnnnnnnnnnnnnnnnnnnnnnnnnnnnnnnnnnnnnnnnnnnnnnnnnnnnnnnnnnnnnnnnnnnnnnnnnnnnnnnnnnnnnnnnnnnnnnnnnnnnnnnnnnnnnnnnnnnnnnnnnnnnnnnnnnnnnnnnnnnnnnnnnnnnnnnnnnnnnnnnnnnnnnnnnnnnnnnnnnnnnnnnnnnnnnnnnnnnnnnnnnnnnnnnnnnnnnnnnnnnnnnnnnnnnnnnnnnnnnnnnnnnnnnnnnnnnnnnnnnnnnnnnnnnnnnnnnnnnnnnnnnnnnnnnnnnnnnnnnnnnnnnnnnnnnnnnnnnnnnnnnnnnnnnnnnnnnnnnnnnnnnnnnnnnnnnnnnnnnnnnnnnnnnnnnnnnnnnnnnnnnnnnnnnnnnnnnnnnnnnnnnnnnnnnnnnnnnnnnnnnnnnnnnnnnnnnnnnnnnnnnnnnnnnnnnnnnnnnnnnnnnnnnnnnnnnnnnnnnnnnnnnnnnnnnnnnnnnnnnnnnnnnnnnnnnnnnnnnnnnnnnnnnnnnnnnnnnnnnnnnnnnnnnnnnnnnnnnnnnnnnnnnnnnnnnnnnnnnnnnnnnnnnnnnnnnnnnnnnnnnnnnnnnnnnnnnnnnnnnnnnnnnnnnnnnnnnnnnnnnnnnnnnnnnnnnnnnnnnnnnnnnnnnnnnnnnnnnnnnnnnnnnnnnnnnnnnnnnnnnnnnnnnnnnnnnnnnnnnnnnnnnnnnnnnnnnnnnnnnnnnnnnnnnnnnnnnnnnnnnnnnnnnnnnnnnnnnnnnnnnnnnnnnnnnnnnnnnnnnnnnnnnnnnnnnnnnnnnnnnnnnnnnnnnnnnnnnnnnnnnnnnnnnnnnnnnnnnnnnnnnnnnnnnnnnnnnnnnnnnnnnnnnnnnnnnnnnnnnnnnnnnnnnnnnnnnnnnnnnnnnnnnnnnnnnnnnnnnnnnnnnnnnnnnnnnnnnnnnnnnnnnnnnnnnnnnnnnnnnnnnnnnnnnnnnnnnnnnnnnnnnnnnnnnnnnnnnnnnnnnnnnnnnnnnnnnnnnnnnnnnnnnnnnnnnnnnnnnnnnnnnnnnnnnnnnnnnnnnnnnnnnnnnnnnnnnnnnnnnnnnnnnnnnnnnnnnnnnnnnnnnnnnnnnnnnnnnnnnnnnnnnnnnnnnnnnnnnnnnnnnnnnnnnnnnnnnnnnnnnnnnnnnnnnnnnnnnnnnnnnnnnnnnnnnnnnnnnnnnnnnnnnnnnnnnnnnnnnnnnnnnnnnnnnnnnnnnnnnnnnnnnnnnnnnnnnnnnnnnnnnnnnnnnnnnnnnnnnnnnnnnnnnnnnnnnnnnnnnnnnnnnnnnnnnnnnnnnnnnnnnnnnnnnnnnnnnnnnnnnnnnnnnnnnnnnnnnnnnnnnnnnnnnnnnnnnnnnnnnnnnnnnnnnnnnnnnnnnnnnnnnnnnnnnnnnnnnnnnnnnnnnnnnnnnnnnnnnnnnnnnnnnnnnnnnnnnnnnnnnnnnnnnnnnnnnnnnnnnnnnnnnnnnnnnnnnnnnnnnnnnnnnnnnnnnnnnnnnnnnnnnnnnnnnnnnnnnnnnnnnnnnnnnnnnnnnnnnnnnnnnnnnnnnnnnnnnnnnnnnnnnnnnnnnnnnnnnnnnnnnnnnnnnnnnnnnnnnnnnnnnnnnnnnnnnnnnnnnnnnnnnnnnnnnnnnnnnnnnnnnnnnnnnnnnnnnnnnnnnnnnnnnnnnnnnnnnnnnnnnnnnnnnnnnnnnnnnnnnnnnnnnnnnnnnnnnnnnnnnnnnnnnnnnnnnnnnnnnnnnnnnnnnnnnnnnnnnnnnnnnnnnnnnnnnnnnnnnnnnnnnnnnnnnnnnnnnnnnnnnnnnnnnnnnnnnnnnnnnnnnnnnnnnnnnnnnnnnnnnnnnnnnnnnnnnnnnnnnnnnnnnnnnnnnnnnnnnnnnnnnnnnnnnnnnnnnnnnnnnnnnnnnnnnnnnnnnnnnnnnnnnnnnnnnnnnnnnnnnnnnnnnnnnnnnnnnnnnnnnnnnnnnnnnnnnnnnnnnnnnnnnnnnnnnnnnnnnnnnnnnnnnnnnnnnnnnnnnnnnnnnnnnnnnnnnnnnnnnnnnnnnnnnnnnnnnnnnnnnnnnnnnnnnnnnnnnnnnnnnnnnnnnnnnnnnnnnnnnnnnnnnnnnnnnnnnnnnnnnnnnnnnnnnnnnnnnnnnnnnnnnnnnnnnnnnnnnnnnnnnnnnnnnnnnnnnnnnnnnnnnnnnnnnnnnnnnnnnnnnnnnnnnnnnnnnnnnnnnnnnnnnnnnnnnnnnnnnnnnnnnnnnnnnnnnnnnnnnnnnnnnnnnnnnnnnnnnnnnnnnnnnnnnnnnnnnnnnnnnnnnnnnnnnnnnnnnnnnnnnnnnnnnnnnnnnnnnnnnnnnnnnnnnnnnnnnnnnnnnnnnnnnnnnnnnnnnnnnnnnnnnnnnnnnnnnnnnnnnnnnnnnnnnnnnnnnnnnnnnnnnnnnnnnnnnnnnnnnnnnnnnnnnnnnnnnnnnnnnnnnnnnnnnnnnnnnnnnnnnnnnnnnnnnnnnnnnnnnnnnnnnnnnnnnnnnnnnnnnnnnnnnnnnnnnnnnnnnnnnnnnnnnnnnnnnnnnnnnnnnnnnnnnnnnnnnnnnnnnnnnnnnnnnnnnnnnnnnnnnnnnnnnnnnnnnnnnnnnnnnnnnnnnnnnnnnnnnnnnnnnnnnnnnnnnnnnnnnnnnnnnnnnnnnnnnnnnnnnnnnnnnnnnnnnnnnnnnnnnnnnnnnnnnnnnnnnnnnnnnnnnnnnnnnnnnnnnnnnnnnnnnnnnnnnnnnnnnnnnnnnnnnnnnnnnnnnnnnnnnnnnnnnnnnnnnnnnnnnnnnnnnnnnnnnnnnnnnnnnnnnnnnnnnnnnnnnnnnnnnnnnnnnnnnnnnnnnnnnnnnnnnnnnnnnnnnnnnnnnnnnnnnnnnnnnnnnnnnnnnnnnnnnnnnnnnnnnnnnnnnnnnnnnnnnnnnnnnnnnnnnnnnnnnnnnnnnnnnnnnnnnnnnnnnnnnnnnnnnnnnnnnnnnnnnnnnnnnnnnnnnnnnnnnnnnnnnnnnnnnnnnnnnnnnnnnnnnnnnnnnnnnnnnnnnnnnnnnnnnnnnnnnnnnnnnnnnnnnnnnnnnnnnnnnnnnnnnnnnnnnnnnnnnnnnnnnnnnnnnnnnnnnnnnnnnnnnnnnnnnnnnnnnnnnnnnnnnnnnnnnnnnnnnnnnnnnnnnnnnnnnnnnnnnnnnnnnnnnnnnnnnnnnnnnnnnnnnnnnnnnnnnnnnnnnnnnnnnnnnnnnnnnnnnnnnnnnnnnnnnnnnnnnnnnnnnnnnnnnnnnnnnnnnnnnnnnnnnnnnnnnnnnnnnnnnnnnnnnnnnnnnnnnnnnnnnnnnnnnnnnnnnnnnnnnnnnnnnnnnnnnnnnnnnnnnnnnnnnnnnnnnnnnnnnnnnnnnnnnnnnnnnnnnnnnnnnnnnnnnnnnnnnnnnnnnnnnnnnnnnnnnnnnnnnnnnnnnnnnnnnnnnnnnnnnnnnnnnnnnnnnnnnnnnnnnnnnnnnnnnnnnnnnnnnnnnnnnnnnnnnnnnnnnnnnnnnnnnnnnnnnnnnnnnnnnnnnnnnnnnnnnnnnnnnnnnnnnnnnnnnnnnnnnnnnnnnnnnnnnnnnnnnnnnnnnnnnnnnnnnnnnnnnnnnnnnnnnnnnnnnnnnnnnnnnnnnnnnnnnnnnnnnnnnnnnnnnnnnnnnnnnnnnnnnnnnnnnnnnnnnnnnnnnnnnnnnnnnnnnnnnnnnnnnnnnnnnnnnnnnnnnnnnnnnnnnnnnnnnnnnnnnnnnnnnnnnnnnnnnnnnnnnnnnnnnnnnnnnnnnnnnnnnnnnnnnnnnnnnnnnnnnnnnnnnnnnnnnnnnnnnnnnnnnnnnnnnnnnnnnnnnnnnnnnnnnnnnnnnnnnnnnnnnnnnnnnnnnnnnnnnnnnnnnnnnnnnnnnnnnnnnnnnnnnnnnnnnnnnnnnnnnnnnnnnnnnnnnnnnnnnnnnnnnnnnnnnnnnnnnnnnnnnnnnnnnnnnnnnnnnnnnnnnnnnnnnnnnnnnnnnnnnnnnnnnnnnnnnnnnnnnnnnnnnnnnnnnnnnnnnnnnnnnnnnnnnnnnnnnnnnnnnnnnnnnnnnnnnnnnnnnnnnnnnnnnnnnnnnnnnnnnnnnnnnnnnnnnnnnnnnnnnnnnnnnnnnnnnnnnnnnnnnnnnnnnnnnnnnnnnnnnnnnnnnnnnnnnnnnnnnnnnnnnnnnnnnnnnnnnnnnnnnnnnnnnnnnnnnnnnnnnnnnnnnnnnnnnnnnnnnnnnnnnnnnnnnnnnnnnnnnnnnnnnnnnnnnnnnnnnnnnnnnnnnnnnnnnnnnnnnnnnnnnnnnnnnnnnnnnnnnnnnnnnnnnnnnnnnnnnnnnnnnnnnnnnnnnnnnnnnnnnnnnnnnnnnnnnnnnnnnnnnnnnnnnnnnnnnnnnnnnnnnnnnnnnnnnnnnnnnnnnnnnnnnnnnnnnnnnnnnnnnnnnnnnnnnnnnnnnnnnnnnnnnnnnnnnnnnnnnnnnnnnnnnnnnnnnnnnnnnnnnnnnnnnnnnnnnnnnnnnnnnnnnnnnnnnnnnnnnnnnnnnnnnnnnnnnnnnnnnnnnnnnnnnnnnnnnnnnnnnnnnnnnnnnnnnnnnnnnnnnnnnnnnnnnnnnnnnnnnnnnnnnnnnnnnnnnnnnnnnnnnnnnnnnnnnnnnnnnnnnnnnnnnnnnnnnnnnnnnnnnnnnnnnnnnnnnnnnnnnnnnnnnnnnnnnnnnnnnnnnnnnnnnnnnnnnnnnnnnnnnnnnnnnnnnnnnnnnnnnnnnnnnnnnnnnnnnnnnnnnnnnnnnnnnnnnnnnnnnnnnnnnnnnnnnnnnnnnnnnnnnnnnnnnnnnnnnnnnnnnnnnnnnnnnnnnnnnnnnnnnnnnnnnnnnnnnnnnnnnnnnnnnnnnnnnnnnnnnnnnnnnnnnnnnnnnnnnnnnnnnnnnnnnnnnnnnnnnnnnnnnnnnnnnnnnnnnnnnnnnnnnnnnnnnnnnnnnnnnnnnnnnnnnnnnnnnnnnnnnnnnnnnnnnnnnnnnnnnnnnnnnnnnnnnnnnnnnnnnnnnnnnnnnnnnnnnnnnnnnnnnnnnnnnnnnnnnnnnnnnnnnnnnnnnnnnnnnnnnnnnnnnnnnnnnnnnnnnnnnnnnnnnnnnnnnnnnnnnnnnnnnnnnnnnnnnnnnnnnnnnnnnnnnnnnnnnnnnnnnnnnnnnnnnnnnnnnnnnnnnnnnnnnnnnnnnnnnnnnnnnnnnnnnnnnnnnnnnnnnnnnnnnnnnnnnnnnnnnnnnnnnnnnnnnnnnnnnnnnnnnnnnnnnnnnnnnnnnnnnnnnnnnnnnnnnnnnnnnnnnnnnnnnnnnnnnnnnnnnnnnnnnnnnnnnnnnnnnnnnnnnnnnnnnnnnnnnnnnnnnnnnnnnnnnnnnnnnnnnnnnnnnnnnnnnnnnnnnnnnnnnnnnnnnnnnnnnnnnnnnnnnnnnnnnnnnnnnnnnnnnnnnnnnnnnnnnnnnnnnnnnnnnnnnnnnnnnnnnnnnnnnnnnnnnnnnnnnnnnnnnnnnnnnnnnnnnnnnnnnnnnnnnnnnnnnnnnnnnnnnnnnnnnnnnnnnnnnnnnnnnnnnnnnnnnnnnnnnnnnnnnnnnnnnnnnnnnnnnnnnnnnnnnnnnnnnnnnnnnnnnnnnnnnnnnnnnnnnnnnnnnnnnnnnnnnnnnnnnnnnnnnnnnnnnnnnnnnnnnnnnnnnnnnnnnnnnnnnnnnnnnnnnnnnnnnnnnnnnnnnnnnnnnnnnnnnnnnnnnnnnnnnnnnnnnnnnnnnnnnnnnnnnnnnnnnnnnnnnnnnnnnnnnnnnnnnnnnnnnnnnnnnnnnnnnnnnnnnnnnnnnnnnnnnnnnnnnnnnnnnnnnnnnnnnnnnnnnnnnnnnnnnnnnnnnnnnnnnnnnnnnnnnnnnnnnnnnnnnnnnnnnnnnnnnnnnnnnnnnnnnnnnnnnnnnnnnnnnnnnnnnnnnnnnnnnnnnnnnnnnnnnnnnnnnnnnnnnnnnnnnnnnnnnnnnnnnnnnnnnnnnnnnnnnnnnnnnnnnnnnnnnnnnnnnnnnnnnnnnnnnnnnnnnnnnnnnnnnnnnnnnnnnnnnnnnnnnnnnnnnnnnnnnnnnnnnnnnnnnnnnnnnnnnnnnnnnnnnnnnnnnnnnnnnnnnnnnnnnnnnnnnnnnnnnnnnnnnnnnnnnnnnnnnnnnnnnnnnnnnnnnnnnnnnnnnnnnnnnnnnnnnnnnnnnnnnnnnnnnnnnnnnnnnnnnnnnnnnnnnnnnnnnnnnnnnnnnnnnnnnnnnnnnnnnnnnnnnnnnnnnnnnnnnnnnnnnnnnnnnnnnnnnnnnnnnnnnnnnnnnnnnnnnnnnnnnnnnnnnnnnnnnnnnnnnnnnnnnnnnnnnnnnnnnnnnnnnnnnnnnnnnnnnnnnnnnnnnnnnnnnnnnnnnnnnnnnnnnnnnnnnnnnnnnnnnnnnnnnnnnnnnnnnnnnnnnnnnnnnnnnnnnnnnnnnnnnnnnnnnnnnnnnnnnnnnnnnnnnnnnnnnnnnnnnnnnnnnnnnnnnnnnnnnnnnnnnnnnnnnnnnnnnnnnnnnnnnnnnnnnnnnnnnnnnnnnnnnnnnnnnnnnnnnnnnnnnnnnnnnnnnnnnnnnnnnnnnnnnnnnnnnnnnnnnnnnnnnnnnnnnnnnnnnnnnnnnnnnnnnnnnnnnnnnnnnnnnnnnnnnnnnnnnnnnnnnnnnnnnnnnnnnnnnnnnnnnnnnnnnnnnnnnnnnnnnnnnnnnnnnnnnnnnnnnnnnnnnnnnnnnnnnnnnnnnnnnnnnnnnnnnnnnnnnnnnnnnnnnnnnnnnnnnnnnnnnnnnnnnnnnnnnnnnnnnnnnnnnnnnnnnnnnnnnnnnnnnnnnnnnnnnnnnnnnnnnnnnnnnnnnnnnnnnnnnnnnnnnnnnnnnnnnnnnnnnnnnnnnnnnnnnnnnnnnnnnnnnnnnnnnnnnnnnnnnnnnnnnnnnnnnnnnnnnnnnnnnnnnnnnnnnnnnnnnnnnnnnnnnnnnnnnnnnnnnnnnnnnnnnnnnnnnnnnnnnnnnnnnnnnnnnnnnnnnnnnnnnnnnnnnnnnnnnnnnnnnnnnnnnnnnnnnnnnnnnnnnnnnnnnnnnnnnnnnnnnnnnnnnnnnnnnnnnnnnnnnnnnnnnnnnnnnnnnnnnnnnnnnnnnnnnnnnnnnnnnnnnnnnnnnnnnnnnnnnnnnnnnnnnnnnnnnnnnnnnnnnnnnnnnnnnnnnnnnnnnnnnnnnnnnnnnnnnnnnnnnnnnnnnnnnnnnnnnnnnnnnnnnnnnnnnnnnnnnnnnnnnnnnnnnnnnnnnnnnnnnnnnnnnnnnnnnnnnnnnnnnnnnnnnnnnnnnnnnnnnnnnnnnnnnnnnnnnnnnnnnnnnnnnnnnnnnnnnnnnnnnnnnnnnnnnnnnnnnnnnnnnnnnnnnnnnnnnnnnnnnnnnnnnnnnnnnnnnnnnnnnnnnnnnnnnnnnnnnnnnnnnnnnnnnnnnnnnnnnnnnnnnnnnnnnnnnnnnnnnnnnnnnnnnnnnnnnnnnnnnnnnnnnnnnnnnnnnnnnnnnnnnnnnnnnnnnnnnnnnnnnnnnnnnnnnnnnnnnnnnnnnnnnnnnnnnnnnnnnnnnnnnnnnnnnnnnnnnnnnnnnnnnnnnnnnnnnnnnnnnnnnnnnnnnnnnnnnnnnnnnnnnnnnnnnnnnnnnnnnnnnnnnnnnnnnnnnnnnnnnnnnnnnnnnnnnnnnnnnnnnnnnnnnnnnnnnnnnnnnnnnnnnnnnnnnnnnnnnnnnnnnnnnnnnnnnnnnnnnnnnnnnnnnnnnnnnnnnnnnnnnnnnnnnnnnnnnnnnnnnnnnnnnnnnnnnnnnnnnnnnnnnnnnnnnnnnnnnnnnnnnnnnnnnnnnnnnnnnnnnnnnnnnnnnnnnnnnnnnnnnnnnnnnnnnnnnnnnnnnnnnnnnnnnnnnnnnnnnnnnnnnnnnnnnnnnnnnnnnnnnnnnnnnnnnnnnnnnnnnnnnnnnnnnnnnnnnnnnnnnnnnnnnnnnnnnnnnnnnnnnnnnnnnnnnnnnnnnnnnnnnnnnnnnnnnnnnnnnnnnnnnnnnnnnnnnnnnnnnnnnnnnnnnnnnnnnnnnnnnnnnnnnnnnnnnnnnnnnnnnnnnnnnnnnnnnnnnnnnnnnnnnnnnnnnnnnnnnnnnnnnnnnnnnnnnnnnnnnnnnnnnnnnnnnnnnnnnnnnnnnnnnnnnnnnnnnnnnnnnnnnnnnnnnnnnnnnnnnnnnnnnnnnnnnnnnnnnnnnnnnnnnnnnnnnnnnnnnnnnnnnnnnnnnnnnnnnnnnnnnnnnnnnnnnnnnnnnnnnnnnnnnnnnnnnnnnnnnnnnnnnnnnnnnnnnnnnnnnnnnnnnnnnnnnnnnnnnnnnnnnnnnnnnnnnnnnnnnnnnnnnnnnnnnnnnnnnnnnnnnnnnnnnnnnnnnnnnnnnnnnnnnnnnnnnnnnnnnnnnnnnnnnnnnnnnnnnnnnnnnnnnnnnnnnnnnnnnnnnnnnnnnnnnnnnnnnnnnnnnnnnnnnnnnnnnnnnnnnnnnnnnnnnnnnnnnnnnnnnnnnnnnnnnnnnnnnnnnnnnnnnnnnnnnnnnnnnnnnnnnnnnnnnnnnnnnnnnnnnnnnnnnnnnnnnnnnnnnnnnnnnnnnnnnnnnnnnnnnnnnnnnnnnnnnnnnnnnnnnnnnnnnnnnnnnnnnnnnnnnnnnnnnnnnnnnnnnnnnnnnnnnnnnnnnnnnnnnnnnnnnnnnnnnnnnnnnnnnnnnnnnnnnnnnnnnnnnnnnnnnnnnnnnnnnnnnnnnnnnnnnnnnnnnnnnnnnnnnnnnnnnnnnnnnnnnnnnnnnnnnnnnnnnnnnnnnnnnnnnnnnnnnnnnnnnnnnnnnnnnnnnnnnnnnnnnnnnnnnnnnnnnnnnnnnnnnnnnnnnnnnnnnnnnnnnnnnnnnnnnnnnnnnnnnnnnnnnnnnnnnnnnnnnnnnnnnnnnnnnnnnnnnnnnnnnnnnnnnnnnnnnnnnnnnnnnnnnnnnnnnnnnnnnnnnnnnnnnnnnnnnnnnnnnnnnnnnnnnnnnnnnnnnnnnnnnnnnnnnnnnnnnnnnnnnnnnnnnnnnnnnnnnnnnnnnnnnnnnnnnnnnnnnnnnnnnnnnnnnnnnnnnnnnnnnnnnnnnnnnnnnnnnnnnnnnnnnnnnnnnnnnnnnnnnnnnnnnnnnnnnnnnnnnnnnnnnnnnnnnnnnnnnnnnnnnnnnnnnnnnnnnnnnnnnnnnnnnnnnnnnnnnnnnnnnnnnnnnnnnnnnnnnnnnnnnnnnnnnnnnnnnnnnnnnnnnnnnnnnnnnnnnnnnnnnnnnnnnnnnnnnnnnnnnnnnnnnnnnnnnnnnnnnnnnnnnnnnnnnnnnnnnnnnnnnnnnnnnnnnnnnnnnnnnnnnnnnnnnnnnnnnnnnnnnnnnnnnnnnnnnnnnnnnnnnnnnnnnnnnnnnnnnnnnnnnnnnnnnnnnnnnnnnnnnnnnnnnnnnnnnnnnnnnnnnnnnnnnnnnnnnnnnnnnnnnnnnnnnnnnnnnnnnnnnnnnnnnnnnnnnnnnnnnnnnnnnnnnnnnnnnnnnnnnnnnnnnnnnnnnnnnnnnnnnnnnnnnnnnnnnnnnnnnnnnnnnnnnnnnnnnnnnnnnnnnnnnnnnnnnnnnnnnnnnnnnnnnnnnnnnnnnnnnnnnnnnnnnnnnnnnnnnnnnnnnnnnnnnnnnnnnnnnnnnnnnnnnnnnnnnnnnnnnnnnnnnnnnnnnnnnnnnnnnnnnnnnnnnnnnnnnnnnnnnnnnnnnnnnnnnnnnnnnnnnnnnnnnnnnnnnnnnnnnnnnnnnnnnnnnnnnnnnnnnnnnnnnnnnnnnnnnnnnnnnnnnnnnnnnnnnnnnnnnnnnnnnnnnnnnnnnnnnnnnnnnnnnnnnnnnnnnnnnnnnnnnnnnnnnnnnnnnnnnnnnnnnnnnnnnnnnnnnnnnnnnnnnnnnnnnnnnnnnnnnnnnnnnnnnnnnnnnnnnnnnnnnnnnnnnnnnnnnnnnnnnnnnnnnnnnnnnnnnnnnnnnnnnnnnnnnnnnnnnnnnnnnnnnnnnnnnnnnnnnnnnnnnnnnnnnnnnnnnnnnnnnnnnnnnnnnnnnnnnnnnnnnnnnnnnnnnnnnnnnnnnnnnnnnnnnnnnnnnnnnnnnnnnnnnnnnnnnnnnnnnnnnnnnnnnnnnnnnnnnnnnnnnnnnnnnnnnnnnnnnnnnnnnnnnnnnnnnnnnnnnnnnnnnnnnnnnnnnnnnnnnnnnnnnnnnnnnnnnnnnnnnnnnnnnnnnnnnnnnnnnnnnnnnnnnnnnnnnnnnnnnnnnnnnnnnnnnnnnnnnnnnnnnnnnnnnnnnnnnnnnnnnnnnnnnnnnnnnnnnnnnnnnnnnnnnnnnnnnnnnnnnnnnnnnnnnnnnnnnnnnnnnnnnnnnnnnnnnnnnnnnnnnnnnnnnnnnnnnnnnnnnnnnnnnnnnnnnnnnnnnnnnnnnnnnnnnnnnnnnnnnnnnnnnnnnnnnnnnnnnnnnnnnnnnnnnnnnnnnnnnnnnnnnnnnnnnnnnnnnnnnnnnnnnnnnnnnnnnnnnnnnnnnnnnnnnnnnnnnnnnnnnnnnnnnnnnnnnnnnnnnnnnnnnnnnnnnnnnnnnnnnnnnnnnnnnnnnnnnnnnnnnnnnnnnnnnnnnnnnnnnnnnnnnnnnnnnnnnnnnnnnnnnnnnnnnnnnnnnnnnnnnnnnnnnnnnnnnnnnnnnnnnnnnnnnnnnnnnnnnnnnnnnnnnnnnnnnnnnnnnnnnnnnnnnnnnnnnnnnnnnnnnnnnnnnnnnnnnnnnnnnnnnnnnnnnnnnnnnnnnnnnnnnnnnnnnnnnnnnnnnnnnnnnnnnnnnnnnnnnnnnnnnnnnnnnnnnnnnnnnnnnnnnnnnnnnnnnnnnnnnnnnnnnnnnnnnnnnnnnnnnnnnnnnnnnnnnnnnnnnnnnnnnnnnnnnnnnnnnnnnnnnnnnnnnnnnnnnnnnnnnnnnnnnnnnnnnnnnnnnnnnnnnnnnnnnnnnnnnnnnnnnnnnnnnnnnnnnnnnnnnnnnnnnnnnnnnnnnnnnnnnnnnnnnnnnnnnnnnnnnnnnnnnnnnnnnnnnnnnnnnnnnnnnnnnnnnnnnnnnnnnnnnnnnnnnnnnnnnnnnnnnnnnnnnnnnnnnnnnnnnnnnnnnnnnnnnnnnnnnnnnnnnnnnnnnnnnnnnnnnnnnnnnnnnnnnnnnnnnnnnnnnnnnnnnnnnnnnnnnnnnnnnnnnnnnnnnnnnnnnnnnnnnnnnnnnnnnnnnnnnnnnnnnnnnnnnnnnnnnnnnnnnnnnnnnnnnnnnnnnnnnnnnnnnnnnnnnnnnnnnnnnnnnnnnnnnnnnnnnnnnnnnnnnnnnnnnnnnnnnnnnnnnnnnnnnnnnnnnnnnnnnnnnnnnnnnnnnnnnnnnnnnnnnnnnnnnnnnnnnnnnnnnnnnnnnnnnnnnnnnnnnnnnnnnnnnnnnnnnnnnnnnnnnnnnnnnnnnnnnnnnnnnnnnnnnnnnnnnnnnnnnnnnnnnnnnnnnnnnnnnnnnnnnnnnnnnnnnnnnnnnnnnnnnnnnnnnnnnnnnnnnnnnnnnnnnnnnnnnnnnnnnnnnnnnnnnnnnnnnnnnnnnnnnnnnnnnnnnnnnnnnnnnnnnnnnnnnnnnnnnnnnnnnnnnnnnnnnnnnnnnnnnnnnnnnnnnnnnnnnnnnnnnnnnnnnnnnnnnnnnnnnnnnnnnnnnnnnnnnnnnnnnnnnnnnnnnnnnnnnnnnnnnnnnnnnnnnnnnnnnnnnnnnnnnnnnnnnnnnnnnnnnnnnnnnnnnnnnnnnnnnnnnnnnnnnnnnnnnnnnnnnnnnnnnnnnnnnnnnnnnnnnnnnnnnnnnnnnnnnnnnnnnnnnnnnnnnnnnnnnnnnnnnnnnnnnnnnnnnnnnnnnnnnnnnnnnnnnnnnnnnnnnnnnnnnnnnnnnnnnnnnnnnnnnnnnnnnnnnnnnnnnnnnnnnnnnnnnnnnnnnnnnnnnnnnnnnnnnnnnnnnnnnnnnnnnnnnnnnnnnnnnnnnnnnnnnnnnnnnnnnnnnnnnnnnnnnnnnnnnnnnnnnnnnnnnnnnnnnnnnnnnnnnnnnnnnnnnnnnnnnnnnnnnnnnnnnnnnnnnnnnnnnnnnnnnnnnnnnnnnnnnnnnnnnnnnnnnnnnnnnnnnnnnnnnnnnnnnnnnnnnnnnnnnnnnnnnnnnnnnnnnnnnnnnnnnnnnnnnnnnnnnnnnnnnnnnnnnnnnnnnnnnnnnnnnnnnnnnnnnnnnnnnnnnnnnnnnnnnnnnnnnnnnnnnnnnnnnnnnnnnnnnnnnnnnnnnnnnnnnnnnnnnnnnnnnnnnnnnnnnnnnnnnnnnnnnnnnnnnnnnnnnnnnnnnnnnnnnnnnnnnnnnnnnnnnnnnnnnnnnnnnnnnnnnnnnnnnnnnnnnnnnnnnnnnnnnnnnnnnnnnnnnnnnnnnnnnnnnnnnnnnnnnnnnnnnnnnnnnnnnnnnnnnnnnnnnnnnnnnnnnnnnnnnnnnnnnnnnnnnnnnnnnnnnnnnnnnnnnnnnnnnnnnnnnnnnnnnnnnnnnnnnnnnnnnnnnnnnnnnnnnnnnnnnnnnnnnnnnnnnnnnnnnnnnnnnnnnnnnnnnnnnnnnnnnnnnnnnnnnnnnnnnnnnnnnnnnnnnnnnnnnnnnnnnnnnnnnnnnnnnnnnnnnnnnnnnnnnnnnnnnnnnnnnnnnnnnnnnnnnnnnnnnnnnnnnnnnnnnnnnnnnnnnnnnnnnnnnnnnnnnnnnnnnnnnnnnnnnnnnnnnnnnnnnnnnnnnnnnnnnnnnnnnnnnnnnnnnnnnnnnnnnnnnnnnnnnnnnnnnnnnnnnnnnnnnnnnnnnnnnnnnnnnnnnnnnnnnnnnnnnnnnnnnnnnnnnnnnnnnnnnnnnnnnnnnnnnnnnnnnnnnnnnnnnnnnnnnnnnnnnnnnnnnnnnnnnnnnnnnnnnnnnnnnnnnnnnnnnnnnnnnnnnnnnnnnnnnnnnnnnnnnnnnnnnnnnnnnnnnnnnnnnnnnnnnnnnnnnnnnnnnnnnnnnnnnnnnnnnnnnnnnnnnnnnnnnnnnnnnnnnnnnnnnnnnnnnnnnnnnnnnnnnnnnnnnnnnnnnnnnnnnnnnnnnnnnnnnnnnnnnnnnnnnnnnnnnnnnnnnnnnnnnnnnnnnnnnnnnnnnnnnnnnnnnnnnnnnnnnnnnnnnnnnnnnnnnnnnnnnnnnnnnnnnnnnnnnnnnnnnnnnnnnnnnnnnnnnnnnnnnnnnnnnnnnnnnnnnnnnnnnnnnnnnnnnnnnnnnnnnnnnnnnnnnnnnnnnnnnnnnnnnnnnnnnnnnnnnnnnnnnnnnnnnnnnnnnnnnnnnnnnnnnnnnnnnnnnnnnnnnnnnnnnnnnnnnnnnnnnnnnnnnnnnnnnnnnnnnnnnnnnnnnnnnnnnnnnnnnnnnnnnnnnnnnnnnnnnnnnnnnnnnnnnnnnnnnnnnnnnnnnnnnnnnnnnnnnnnnnnnnnnnnnnnnnnnnnnnnnnnnnnnnnnnnnnnnnnnnnnnnnnnnnnnnnnnnnnnnnnnnnnnnnnnnnnnnnnnnnnnnnnnnnnnnnnnnnnnnnnnnnnnnnnnnnnnnnnnnnnnnnnnnnnnnnnnnnnnnnnnnnnnnnnnnnnnnnnnnnnnnnnnnnnnnnnnnnnnnnnnnnnnnnnnnnnnnnnnnnnnnnnnnnnnnnnnnnnnnnnnnnnnnnnnnnnnnnnnnnnnnnnnnnnnnnnnnnnnnnnnnnnnnnnnnnnnnnnnnnnnnnnnnnnnnnnnnnnnnnnnnnnnnnnnnnnnnnnnnnnnnnnnnnnnnnnnnnnnnnnnnnnnnnnnnnnnnnnnnnnnnnnnnnnnnnnnnnnnnnnnnnnnnnnnnnnnnnnnnnnnnnnnnnnnnnnnnnnnnnnnnnnnnnnnnnnnnnnnnnnnnnnnnnnnnnnnnnnnnnnnnnnnnnnnnnnnnnnnnnnnnnnnnnnnnnnnnnnnnnnnnnnnnnnnnnnnnnnnnnnnnnnnnnnnnnnnnnnnnnnnnnnnnnnnnnnnnnnnnnnnnnnnnnnnnnnnnnnnnnnnnnnnnnnnnnnnnnnnnnnnnnnnnnnnnnnnnnnnnnnnnnnnnnnnnnnnnnnnnnnnnnnnnnnnnnnnnnnnnnnnnnnnnnnnnnnnnnnnnnnnnnnnnnnnnnnnnnnnnnnnnnnnnnnnnnnnnnnnnnnnnnnnnnnnnnnnnnnnnnnnnnnnnnnnnnnnnnnnnnnnnnnnnnnnnnnnnnnnnnnnnnnnnnnnnnnnnnnnnnnnnnnnnnnnnnnnnnnnnnnnnnnnnnnnnnnnnnnnnnnnnnnnnnnnnnnnnnnnnnnnnnnnnnnnnnnnnnnnnnnnnnnnnnnnnnnnnnnnnnnnnnnnnnnnnnnnnnnnnnnnnnnnnnnnnnnnnnnnnnnnnnnnnnnnnnnnnnnnnnnnnnnnnnnnnnnnnnnnnnnnnnnnnnnnnnnnnnnnnnnnnnnnnnnnnnnnnnnnnnnnnnnnnnnnnnnnnnnnnnnnnnnnnnnnnnnnnnnnnnnnnnnnnnnnnnnnnnnnnnnnnnnnnnnnnnnnnnnnnnnnnnnnnnnnnnnnnnnnnnnnnnnnnnnnnnnnnnnnnnnnnnnnnnnnnnnnnnnnnnnnnnnnnnnnnnnnnnnnnnnnnnnnnnnnnnnnnnnnnnnnnnnnnnnnnnnnnnnnnnnnnnnnnnnnnnnnnnnnnnnnnnnnnnnnnnnnnnnnnnnnnnnnnnnnnnnnnnnnnnnnnnnnnnnnnnnnnnnnnnnnnnnnnnnnnnnnnnnnnnnnnnnnnnnnnnnnnnnnnnnnnnnnnnnnnnnnnnnnnnnnnnnnnnnnnnnnnnnnnnnnnnnnnnnnnnnnnnnnnnnnnnnnnnnnnnnnnnnnnnnnnnnnnnnnnnnnnnnnnnnnnnnnnnnnnnnnnnnnnnnnnnnnnnnnnnnnnnnnnnnnnnnnnnnnnnnnnnnnnnnnnnnnnnnnnnnnnnnnnnnnnnnnnnnnnnnnnnnnnnnnnnnnnnnnnnnnnnnnnnnnnnnnnnnnnnnnnnnnnnnnnnnnnnnnnnnnnnnnnnnnnnnnnnnnnnnnnnnnnnnnnnnnnnnnnnnnnnnnnnnnnnnnnnnnnnnnnnnnnnnnnnnnnnnnnnnnnnnnnnnnnnnnnnnnnnnnnnnnnnnnnnnnnnnnnnnnnnnnnnnnnnnnnnnnnnnnnnnnnnnnnnnnnnnnnnnnnnnnnnnnnnnnnnnnnnnnnnnnnnnnnnnnnnnnnnnnnnnnnnnnnnnnnnnnnnnnnnnnnnnnnnnnnnnnnnnnnnnnnnnnnnnnnnnnnnnnnnnnnnnnnnnnnnnnnnnnnnnnnnnnnnnnnnnnnnnnnnnnnnnnnnnnnnnnnnnnnnnnnnnnnnnnnnnnnnnnnnnnnnnnnnnnnnnnnnnnnnnnnnnnnnnnnnnnnnnnnnnnnnnnnnnnnnnnnnnnnnnnnnnnnnnnnnnnnnnnnnnnnnnnnnnnnnnnnnnnnnnnnnnnnnnnnnnnnnnnnnnnnnnnnnnnnnnnnnnnnnnnnnnnnnnnnnnnnnnnnnnnnnnnnnnnnnnnnnnnnnnnnnnnnnnnnnnnnnnnnnnnnnnnnnnnnnnnnnnnnnnnnnnnnnnnnnnnnnnnnnnnnnnnnnnnnnnnnnnnnnnnnnnnnnnnnnnnnnnnnnnnnnnnnnnnnnnnnnnnnnnnnnnnnnnnnnnnnnnnnnnnnnnnnnnnnnnnnnnnnnnnnnnnnnnnnnnnnnnnnnnnnnnnnnnnnnnnnnnnnnnnnnnnnnnnnnnnnnnnnnnnnnnnnnnnnnnnnnnnnnnnnnnnnnnnnnnnnnnnnnnnnnnnnnnnnnnnnnnnnnnnnnnnnnnnnnnnnnnnnnnnnnnnnnnnnnnnnnnnnnnnnnnnnnnnnnnnnnnnnnnnnnnnnnnnnnnnnnnnnnnnnnnnnnnnnnnnnnnnnnnnnnnnnnnnnnnnnnnnnnnnnnnnnnnnnnnnnnnnnnnnnnnnnnnnnnnnnnnnnnnnnnnnnnnnnnnnnnnnnnnnnnnnnnnnnnnnnnnnnnnnnnnnnnnnnnnnnnnnnnnnnnnnnnnnnnnnnnnnnnnnnnnnnnnnnnnnnnnnnnnnnnnnnnnnnnnnnnnnnnnnnnnnnnnnnnnnnnnnnnnnnnnnnnnnnnnnnnnnnnnnnnnnnnnnnnnnnnnnnnnnnnnnnnnnnnnnnnnnnnnnnnnnnnnnnnnnnnnnnnnnnnnnnnnnnnnnnnnnnnnnnnnnnnnnnnnnnnnnnnnnnnnnnnnnnnnnnnnnnnnnnnnnnnnnnnnnnnnnnnnnnnnnnnnnnnnnnnnnnnnnnnnnnnnnnnnnnnnnnnnnnnnnnnnnnnnnnnnnnnnnnnnnnnnnnnnnnnnnnnnnnnnnnnnnnnnnnnnnnnnnnnnnnnnnnnnnnnnnnnnnnnnnnnnnnnnnnnnnnnnnnnnnnnnnnnnnnnnnnnnnnnnnnnnnnnnnnnnnnnnnnnnnnnnnnnnnnnnnnnnnnnnnnnnnnnnnnnnnnnnnnnnnnnnnnnnnnnnnnnnnnnnnnnnnnnnnnnnnnnnnnnnnnnnnnnnnnnnnnnnnnnnnnnnnnnnnnnnnnnnnnnnnnnnnnnnnnnnnnnnnnnnnnnnnnnnnnnnnnnnnnnnnnnnnnnnnnnnnnnnnnnnnnnnnnnnnnnnnnnnnnnnnnnnnnnnnnnnnnnnnnnnnnnnnnnnnnnnnnnnnnnnnnnnnnnnnnnnnnnnnnnnnnnnnnnnnnnnnnnnnnnnnnnnnnnnnnnnnnnnnnnnnnnnnnnnnnnnnnnnnnnnnnnnnnnnnnnnnnnnnnnnnnnnnnnnnnnnnnnnnnnnnnnnnnnnnnnnnnnnnnnnnnnnnnnnnnnnnnnnnnnnnnnnnnnnnnnnnnnnnnnnnnnnnnnnnnnnnnnnnnnnnnnnnnnnnnnnnnnnnnnnnnnnnnnnnnnnnnnnnnnnnnnnnnnnnnnnnnnnnnnnnnnnnnnnnnnnnnnnnnnnnnnnnnnnnnnnnnnnnnnnnnnnnnnnnnnnnnnnnnnnnnnnnnnnnnnnnnnnnnnnnnnnnnnnnnnnnnnnnnnnnnnnnnnnnnnnnnnnnnnnnnnnnnnnnnnnnnnnnnnnnnnnnnnnnnnnnnnnnnnnnnnnnnnnnnnnnnnnnnnnnnnnnnnnnnnnnnnnnnnnnnnnnnnnnnnnnnnnnnnnnnnnnnnnnnnnnnnnnnnnnnnnnnnnnnnnnnnnnnnnnnnnnnnnnnnnnnnnnnnnnnnnnnnnnnnnnnnnnnnnnnnnnnnnnnnnnnnnnnnnnnnnnnnnnnnnnnnnnnnnnnnnnnnnnnnnnnnnnnnnnnnnnnnnnnnnnnnnnnnnnnnnnnnnnnnnnnnnnnnnnnnnnnnnnnnnnnnnnnnnnnnnnnnnnnnnnnnnnnnnnnnnnnnnnnnnnnnnnnnnnnnnnnnnnnnnnnnnnnnnnnnnnnnnnnnnnnnnnnnnnnnnnnnnnnnnnnnnnnnnnnnnnnnnnnnnnnnnnnnnnnnnnnnnnnnnnnnnnnnnnnnnnnnnnnnnnnnnnnnnnnnnnnnnnnnnnnnnnnnnnnnnnnnnnnnnnnnnnnnnnnnnnnnnnnnnnnnnnnnnnnnnnnnnnnnnnnnnnnnnnnnnnnnnnnnnnnnnnnnnnnnnnnnnnnnnnnnnnnnnnnnnnnnnnnnnnnnnnnnnnnnnnnnnnnnnnnnnnnnnnnnnnnnnnnnnnnnnnnnnnnnnnnnnnnnnnnnnnnnnnnnnnnnnnnnnnnnnnnnnnnnnnnnnnnnnnnnnnnnnnnnnnnnnnnnnnnnnnnnnnnnnnnnnnnnnnnnnnnnnnnnnnnnnnnnnnnnnnnnnnnnnnnnnnnnnnnnnnnnnnnnnnnnnnnnnnnnnnnnnnnnnnnnnnnnnnnnnnnnnnnnnnnnnnnnnnnnnnnnnnnnnnnnnnnnnnnnnnnnnnnnnnnnnnnnnnnnnnnnnnnnnnnnnnnnnnnnnnnnnnnnnnnnnnnnnnnnnnnnnnnnnnnnnnnnnnnnnnnnnnnnnnnnnnnnnnnnnnnnnnnnnnnnnnnnnnnnnnnnnnnnnnnnnnnnnnnnnnnnnnnnnnnnnnnnnnnnnnnnnnnnnnnnnnnnnnnnnnnnnnnnnnnnnnnnnnnnnnnnnnnnnnnnnnnnnnnnnnnnnnnnnnnnnnnnnnnnnnnnnnnnnnnnnnnnnnnnnnnnnnnnnnnnnnnnnnnnnnnnnnnnnnnnnnnnnnnnnnnnnnnnnnnnnnnnnnnnnnnnnnnnnnnnnnnnnnnnnnnnnnnnnnnnnnnnnnnnnnnnnnnnnnnnnnnnnnnnnnnnnnnnnnnnnnnnnnnnnnnnnnnnnnnnnnnnnnnnnnnnnnnnnnnnnnnnnnnnnnnnnnnnnnnnnnnnnnnnnnnnnnnnnnnnnnnnnnnnnnnnnnnnnnnnnnnnnnnnnnnnnnnnnnnnnnnnnnnnnnnnnnnnnnnnnnnnnnnnnnnnnnnnnnnnnnnnnnnnnnnnnnnnnnnnnnnnnnnnnnnnnnnnnnnnnnnnnnnnnnnnnnnnnnnnnnnnnnnnnnnnnnnnnnnnnnnnnnnnnnnnnnnnnnnnnnnnnnnnnnnnnnnnnnnnnnnnnnnnnnnnnnnnnnnnnnnnnnnnnnnnnnnnnnnnnnnnnnnnnnnnnnnnnnnnnnnnnnnnnnnnnnnnnnnnnnnnnnnnnnnnnnnnnnnnnnnnnnnnnnnnnnnnnnnnnnnnnnnnnnnnnnnnnnnnnnnnnnnnnnnnnnnnnnnnnnnnnnnnnnnnnnnnnnnnnnnnnnnnnnnnnnnnnnnnnnnnnnnnnnnnnnnnnnnnnnnnnnnnnnnnnnnnnnnnnnnnnnnnnnnnnnnnnnnnnnnnnnnnnnnnnnnnnnnnnnnnnnnnnnnnnnnnnnnnnnnnnnnnnnnnnnnnnnnnnnnnnnnnnnnnnnnnnnnnnnnnnnnnnnnnnnnnnnnnnnnnnnnnnnnnnnnnnnnnnnnnnnnnnnnnnnnnnnnnnnnnnnnnnnnnnnnnnnnnnnnnnnnnnnnnnnnnnnnnnnnnnnnnnnnnnnnnnnnnnnnnnnnnnnnnnnnnnnnnnnnnnnnnnnnnnnnnnnnnnnnnnnnnnnnnnnnnnnnnnnnnnnnnnnnnnnnnnnnnnnnnnnnnnnnnnnnnnnnnnnnnnnnnnnnnnnnnnnnnnnnnnnnnnnnnnnnnnnnnnnnnnnnnnnnnnnnnnnnnnnnnnnnnnnnnnnnnnnnnnnnnnnnnnnnnnnnnnnnnnnnnnnnnnnnnnnnnnnnnnnnnnnnnnnnnnnnnnnnnnnnnnnnnnnnnnnnnnnnnnnnnnnnnnnnnnnnnnnnnnnnnnnnnnnnnnnnnnnnnnnnnnnnnnnnnnnnnnnnnnnnnnnnnnnnnnnnnnnnnnnnnnnnnnnnnnnnnnnnnnnnnnnnnnnnnnnnnnnnnnnnnnnnnnnnnnnnnnnnnnnnnnnnnnnnnnnnnnnnnnnnnnnnnnnnnnnnnnnnnnnnnnnnnnnnnnnnnnnnnnnnnnnnnnnnnnnnnnnnnnnnnnnnnnnnnnnnnnnnnnnnnnnnnnnnnnnnnnnnnnnnnnnnnnnnnnnnnnnnnnnnnnnnnnnnnnnnnnnnnnnnnnnnnnnnnnnnnnnnnnnnnnnnnnnnnnnnnnnnnnnnnnnnnnnnnnnnnnnnnnnnnnnnnnnnnnnnnnnnnnnnnnnnnnnnnnnnnnnnnnnnnnnnnnnnnnnnnnnnnnnnnnnnnnnnnnnnnnnnnnnnnnnnnnnnnnnnnnnnnnnnnnnnnnnnnnnnnnnnnnnnnnnnnnnnnnnnnnnnnnnnnnnnnnnnnnnnnnnnnnnnnnnnnnnnnnnnnnnnnnnnnnnnnnnnnnnnnnnnnnnnnnnnnnnnnnnnnnnnnnnnnnnnnnnnnnnnnnnnnnnnnnnnnnnnnnnnnnnnnnnnnnnnnnnnnnnnnnnnnnnnnnnnnnnnnnnnnnnnnnnnnnnnnnnnnnnnnnnnnnnnnnnnnnnnnnnnnnnnnnnnnnnnnnnnnnnnnnnnnnnnnnnnnnnnnnnnnnnnnnnnnnnnnnnnnnnnnnnnnnnnnnnnnnnnnnnnnnnnnnnnnnnnnnnnnnnnnnnnnnnnnnnnnnnnnnnnnnnnnnnnnnnnnnnnnnnnnnnnnnnnnnnnnnnnnnnnnnnnnnnnnnnnnnnnnnnnnnnnnnnnnnnnnnnnnnnnnnnnnnnnnnnnnnnnnnnnnnnnnnnnnnnnnnnnnnnnnnnnnnnnnnnnnnnnnnnnnnnnnnnnnnnnnnnnnnnnnnnnnnnnnnnnnnnnnnnnnnnnnnnnnnnnnnnnnnnnnnnnnnnnnnnnnnnnnnnnnnnnnnnnnnnnnnnnnnnnnnnnnnnnnnnnnnnnnnnnnnnnnnnnnnnnnnnnnnnnnnnnnnncactaattcggatcaaccctgaaatcgccgaacaacccgaccgcgccgacgaattgattcacaaactacgcgccatcctcatcacagtaaataatgtgggattagtaaagtcaaatgaagagtttgccaagtggtacaagggtgagattacgatgccgttcggcatcgacggtaagcacgttggtgtaaacctaatcgactttgatcatcctgaaaacaactcctatatcttgactaaccagttcaaaattcgtgcccgcgagaccaagattcccgatatcgttctgttcataaacggcattccggtagtagtcggcgaagcgaaaacgccagtacgaccggcagtaacatgggtcgatggtgcgcacgaaatccatgcggtttacgagaatactgtcccgaatctgtttgtacccaacatcctcagtttcgctaccgacggtcgcgatttcttctatggtgccgttcgcacaccacttgaattttggtgcccatggcgattggatgaatccaatagtactcttgcacttttttccggactgaatgaagtcggtaaacaactcaacagtttgttacgaccggaaactttgctcgatatcctgcgtcatttttcaatttatgcgaccaatccgcaaaaacgcaagatcaaagttgtctgtcgctaccagcaatatgaaggtgcaaatgcaatcgtacagcgggtttccgaaggacatatcaagaaggggttgatttggcacttccaaggttctggtaaatcgctactcatgctatttgctgcgcagaaactgcgaaagaaagccgacctcaagagtcctactatcatcattgtcgtggatcgggtcgatctcgatacacagataaccaatactcttggtgctgccgaagttcctaatatggtcaatgctgatagtatccaagcgttacacgacctgctcgaacgcgacatccgtaagattattgttacgacgattcacaaattcaaggatgcctatcccgacatgaatctgcgggataatatcattcttatggtcgatgaagcccaccgcacacaggaaggtgatctcggtcgtaaaatgcgtgcagcactcccgaatgcgtttctcttcggtatgaccggtactccgatcaatcgttccgacaagaacactttttgggcatttggtgcaccggaggatgagggtggatacctcagccgctatacatttcaggaaagtatccgcgatttacaaacgcttccacttcacttcgaaccgcgactccccaatgttcacattgacaaggaagggctcgatattgctttccgcgaaatggctaatgatctaacggaagaagatcgcaacaaattgagtcaaaaagctgcgaagatgctgctcttcctcaaatcgccagagcggatcagaacgattgtcgaagacattgcgaaccattatcgcacacatgtcgaaccgcacagttttaaagcgatgattgtgactccggatcgtctcgcttgtgttgcttacaaagaagcactcgatgaacaactcggtgtggatgccagtcgagtggtcatttcaacgaccgcaaacgacccactcgaattcaaacaaaaatggggattggataaagaccagcaagagaaagttattgagcagttcaacaatccggattctcaactaaagttcttgattgtgaccgctaaattacttgccggattcgatgctcaactcttgcagacgatgtacctcgataaatcgctgaaagatcacacattattacaagcgatctgtcgcaccaaccgcgtctatccaaataaaacttacggtcgcattgtcgattactttggggttttcgatgatactgcgaaggcgttagagtttgacgaagcgactgtgcgtgctgtaataacgaacctgcaggaattgagagacaaacttccagaattgatcgagaaagcgtgttcccattttcccggagttgatcgtacgattgaaggattcgaaggtctgagtcgggcgcaggattgtatcaactcgaatgaaatgcgcgatgcgtttgctaaggactacgtcactctatcaaaagtgtgggaagcactgagtcccgattcaattctcaatcgttttcagcgtgactacaaatggttatcgcaagtctatacctctgttcgaccagcttcggatgacaacggacgattactctggcatgcgtttggaccgcagacggaaaaattgattcacgagcatgttcatgtctccggcattcacgatgacatggaagagatggtgctcgatgccgagttaatcgacggattgatgaatagtaaggacactaagcgagccaaacagatcgttcttattcttgtcggtcgattagggaaacatccaggtaatcctaagtttaagaaacttagcgagcggttagaggaattgcggaatcgtgctgagcaagggttgattagcagtatcgattttatcaagcacctctgccaaatcgcgcgcgatacgttagagaccgagcgtgagttattttctgcagacgaacggagaactgccaagacagcacttacagaactttttcttgaaatgcgcacagataagacaccgtcagtagtcgaacgcattgtcaacgatatcgatgagatcgtgaaaattgttcggtttgacggttggcagactacgattgcaggagagcgcgaagtccagaaatcgctacgcaagactcttctaaagtatcagcttcataaagaggaagaactgtttgagaaggcgtatgcatatatcaaggaatactactgagcgaatttgtagttgagtacattcatgatctgatgagtttcagtcattgagagcgatttatgcctagtaaaaaacgacaaatagttgaacccaatgagaaacgtcgtgctttaggtcggactcgagccgaggcaacttttcctgtcgcagcacccctatcagggatgccaaaaggttacaacgaatttttccagcagatcaaacaacatattcaacgggaacgattgaaaacggttcttgctgcgaatgccgctatggttttactttactgggatatcggtcggacgattctcgaacgtcaggaacaggagggttggggagcacaagtaattgatcgattgtctgtcgatctacaaaaatcgtttccagaaatgcgcggcttctcgccacgcaacctgaaatacatgcgggcatttgcctctgcatggactgaccggacaattgtgcaagaggcacttgcacaaatcacatggtatcataacctcaccttattggaaaaattagacgatcctgaaacacgcttgtggtacattaacaaaaccgttgagcatgggtggtcccgcaacattctcgcattacagattgactcacaacttcacaaacgccaaggcaaagcaattacgaattttccggtaacgctccctccaactgaatcggatatggctgcacaggtgttcaaagacccatatttgttcgactttttgggtactgccgatccccggcgtgagcatgaaatcgagcaggcattggttgaccatattcagagttttctactggagctgggagcgggatttgcctttgttggcaggcaggttcgattggaagttggggatcaagaattcttagtggacttattattctaccatctcaaattgcgttgttttgtcgtaatcgagctaaaagctgtaccattcgatcctgctttcattggacaaataaatctttacctatctgctgtcgacgatctactacgtcatcccgacgataagccgacaatcggattgctactatgtaggacgaaaaacgagttggtagtggagtatgcactacgcagtttgaagaaaccaattggtgttgccggttgggagactaaaatcgttaaaacacttccaaaggagctgaagggaagcctgccgtcgattaaagaaattgaggatgaacttggcaaccacgaataatgaactacgttatatctttcaactacgggagcgcttatgtgctataacctgttagagaaaaaatggattccggtactctatcgaaacggacaattcgaccgggtcgggatcaaagacgcgctaattaaagccggtcaaatccgagagatcgccgcatcgaatccgatggacaggtttgcagtgatgcgttttttgctcgccattttgtattggtgcaaggggaatccccctgatgaaacaaatatcgattcgtttccagcagagtggttttccaaacttgaagagacagagaatcgggattgcttcaatttacttggaaacggaaagcggttttatcaggatgctgatgcaagacgttctcgtcccacgacagatttgtatcaagagataccaactggacacaatttttggcattttaaacacacaaccgattttcaagaggggttgtgcgcttcctgttgtgcaataggactacttcggctcccattatttatgacttttggtggcaatactaaaccatacctttatccgggaataaatggagttccgcctgtttacataatgtcggtgggcaattcgttgttcgagactctccacaaaaactggatacctcgcgccattcctttcggtgaaccatcttggatcgacctcaattttaatgtgggcgacactgccgaaattccactactcaaagggctaacgatgctcgcccgtaaagtttggttggcagaaacggagagccatcaaacttgctacaactgtggagtaaaatccgatacgattatccgcagttgtgaatttcaatcgccaggtaagcaggaaactgccctttggagagacccacacgcactttatctcagtagcacttctcaaaaatcgataaaagcacctgatccggtttcggctggaaaatttaagatggatcgacccttatggaaattacttgcacctgttatcgaagccgctaaaacgatttatccaacttcgaccacttttgctatcatcggtctcggtacagataatgcgaagtatgtcgatgtttgggaacgaattgttgagttaccatcaaataattcagtacccgaagcagcggtgtctacggttgagcaatggcagaaagagacatcgaacaacgaattcgtaaagcgtctgcctaagacgatgcgagtgaaacggaaactcgatcacctgaaagcaacctacgattccaatcgtcctcatgtcgagcatgccgtctcaacagctgttgggaatcttctatccgggggtgaaacggaatggcaaaacgcagcatcggaatatcgtccaatgcaggagatgatcgcgaaatcactcgcacccggcgctacactaacagcgacgatacggcgaaagagtatcgcgaacgcattacccgatatgcgagcaaaacatgacccaccggagaaaacgaaacgtagaaagtcggctacagaatgagttcaaccaatgattttatcatggtcttacaaacattaaaagcaggtgacctaggactcttgcgaacccatgctaataaaggacttgaccagactgttgatgggttcgatctgtttaccggtttgtggtggccgctacggcaaaagaaccagtttgcaccgcgacgggaagtcgcgtggttgatcgctaaactatatgcaaagtgtcccattgaacatcagtctgattgtttgtttgcacaccaactacagcgatgcgaaccaagagaagaacgtgcgcgaaaccggtttcgacagaaattcgatgaactgataaccactcccttggagcaaatcgagcccacattgcgaagagcgcttcaagaaatttcttcccatgaattgaaactcgactgggtaaaactgaccgatgatctctccttttgggaacaggagaccaagcatcaggaatggataaaccaatatctcagcatcaacgaaagggtacaaccatgttgatcgaaattcacatgatccagaaccacagcccggcgaatcttaatagggacgacctcggcgcaccaaaaacctgttatttcggtggtgtattacgctcgcgcatctcgagtcaatgcatcaagcgaagtattcggatgagtccagagtttgcgaaactgttaggaggagtaagaacgcgcgatctcgctaagaggattcttgacaagatcgaaggtgatgcaaacgacaaaaaacgagtcgaaggcattctcaaagtttgcggtttcaaaccaaagactgaatcaaaagcgaagaaaccgcgcaccactgcaggcgaagaaggagagaccgatgaatccgatgaaaccagtcagagaagcaaggcaccgctcttcgtgacccaacaagccattgagaagattgtgaatctcttccaatcaaggaacagcaaatctgatgatgagttagcaaaagaatttgcgaaagcaatcgctctttacacacaagcgcccgatatggcactaagtggacgtatgcttgaacccgacaaatctgcgaagaaaatttgggaaaaactagaaaagaatgtcgaggcatcgttgcaaacggctcacgctatatcgacccacgccgcctttcctgaaactgattacttcgtggcaatgggagacgaaacacgcgaggaaaaagaagaagctggtgccgatttaatcggtgaacaactatttgcttccgcgtgtttctacaaatatttctccattaattttgagcaacttgtagagaatctcggcgataacaaacaattagccgctcatacagtaggcacatttattcgcactgccgcagtagtaaatccgagtgggaagcaaaacagtttcgccgcgaacaatcctcccgatgggatactcatcgagatcaaaggcacgccaatcagctatgccaacgcctttgcgaatccagtgccagccaaaggggaacgggaaatcatttcacaaagtatcgctcaattaggtcaatatatgcatgaccttgatactgggtttggcatccctaaacagcgcttctggttttcacccaatcttcgctatcccctctacgtggttgaaaacaaacaagagatcgcactaaccgaccataatatcaagtcacttgatgaactgataccaatggttatagctgcaatcggtttcgactggaacgaggtacaacaggcaatcgttaacaacgaggcatagcatgagcgatctgcccaatacgctctttctccgcctagaaagttccatgcaatcatggggtgtacacgaatcgaaattcgtagttcgacgaactgccgaagcgccgacgaaatcgggagtcatcggattgttctgtgctgcgctaggtattacccgtcaacaagcgccggacgagtggttaccgaaactaagtgaacttcgaattggtgtacgaattgatgtaccgggaattcgctggtgggattaccacaccgtcggtgccgaaatgcaaatgcgaaccgcaaagggagaatgtaagtcgggagcaatgctcacccgacgcgagtacctttgcgatgccagttttttggtagtattgcagggcgacccatctctcattcaagagttagaaaaagcggtcaaatacccacagtggacactctaccttggtcgcaaatgctgtgttccgtcgcgaccattgttggaacatccggctgggttctttcccgatccgctctctgcgttaagttcgattccgtggcggaaacgactcaaacgtgataacgaacccaaaaagaacctcgtctgcctgatcgactggcaacccacttcggaacaacccgacgcccctgacgatgcacaggtctggtacgatataccggttagtttcgatccgccctcgcatcgacctcgattcgtcattcgtgaagagttgactgttggcgaacatgggcagataagcattgcaaatgaaccattgcagcacgaaacaccgcgaccaccaagaccccgcgccgattacactaatacgaaatacaaagcgaaaagacgcgaacggctatctcaggatcagcatctctgcgtcttctgcaaatctccggcaaccaccgtgcaacatattacctatcgacacgcgggaggcgaagaaaagcccgacgaattgcgttcgctttgtcgactttgccatgatgccgtgacgatgatcgagtatggggtcgggatgggattagatcgcatcaatcccgaagaggaacgttggcgtgaacttatcatcgaaaaacgctctgaaattgtcgcattccgttcattggaaacccgtcgtcgtcggctatccatcgaggaggtagagtgatgtatcattccaatctcatgatcgatgtcggcgataatccagaccgacctcgccccggtcgtttatggttgcgtaacatctatcacgttcatcaacgattgtcgatggcatttcccatgtccacgacgcaaaaagtcgatccgaattttcttctcccattcgatccaaacgggtttgaccgctctcgttttctcttccgtatcgatcaaatcgttcgagataattatcaacagacgatcatcattgtccaatcggaaacggagccagattggaagtatgcgttccacaacttagatatggttctagcagcaccaataaagccatacgagtacactcctgcatttcagaatggggacattcgtagatttcggattcgtgtcaatccgacgaaaaagagtgctacctacggatcgaatggtgcagatagaaacccttcttccaagtcgcaagggaaacgtgttactctttgggacaaagagacaaaaccaacagatgcgatccttgattggtttgctcgcaaaggatcgcagaaaggtttttctgtcggtagttgcgatgtcgtgaacttgggatgggtagttggtaaaaaaccgaacggaaagggtgacgaacacgtcatgcgctttcgttctgcattgttggaaggaaaactgactgtcaccgatgctatggaatttcatgctgcgataaatgcaggaattggatcggcgaagggattcggatttggtctactttctgtcttcccaattggagatcaccaatgaacgatctccgtgccctacctaaattacgtgatggtttatcgtatgcatacttcgaacattgccgggtcgaacaagacgaaatgtcgattgcggtttggacgaaagaaggaatcatacccgtacctgctgcttcacttggtgtattgttgttgggtcccggctcaacgattacccacgcggcagtgaaagcgcttgctgacaatggttgtatggtattgtggacgggtgaaggcgcgatccggttttatgcgaccggtatcggtgaaacccggaaaggagggcacctcgaacgacaagcggcactgtgggctgaccctgagtcacacgaacgaatcgtgcttcgaatgtaccggatgcgtttccgaaaacgattaccgaagggtttatcattggaacaaattcggggaatggaaggtgttcgtgtacgcgaagcgtatgcgattgcctcgaacgaaaccggtgtggagtgggtcggtcgaagctatgaccggaaccattgggagaattccgatccagtcaatcgcgcactttcggcagcaaatgcctgcctttattcgttgtgccatactgccatcgtgagtggcggctatactcccggtcttggtttcgtccatgtcggtaaagcgctctcattcgtgtacgatattggcgatctatacaaggttgagacgacgatcccactctcgtttcgcgtcgtacaggaatccactgacaacttggaaagtcgggtgcggcatctctgtcgagattacttccacgagtacaaattattagaacgtattttacctgatatcgaccgtttgtttgatttcaacttggacgacgaatctttcggttgggatatcgatgaagacccggcacgtccaactccgtattggaacccaccggaagtggaaaaggaattgacaaatggtagtgatgattcttgagaaggttcctgcgtcattgcgcggtgaattgacacgatggctgttcgaagcaaagaccggtgtctttatcggaaaggtttccgcgatagtccgcgataagctttgggatctttgtgtgggtcgtcgtggaacaccagcggtcattcaaatctggaacgacaacaatgagcaagggttttcgttgcggtcgaatggcgatacatcaaggaattttcaggaaaaagaaggattgtggtttgctgtaaagcatcttcctaaagaggatgcagttgccactgatacttaacacccttttcgtgatctaacttcaatgattacgaagggtaatccccacgcgcgtggggatgaaccgttgaacactccaattttatcaaaactgttgaggtaatccccacgcgcgtggggatgaaccggcgttaaaattccgcgc

SEQ ID NO: 1033 - DNA, 107717 bp, Artificial Sequence
  Synthetic Oligonucleotide
  misc_feature (1)..(97504): n is a, c, g, or t
nnnnnnnnnnnnnnnnnnnnnnnnnnnnnnnnnnnnnnnnnnnnnnnnnnnnnnnnnnnnnnnnnnnnnnnnnnnnnnnnnnnnnnnnnnnnnnnnnnnnnnnnnnnnnnnnnnnnnnnnnnnnnnnnnnnnnnnnnnnnnnnnnnnnnnnnnnnnnnnnnnnnnnnnnnnnnnnnnnnnnnnnnnnnnnnnnnnnnnnnnnnnnnnnnnnnnnnnnnnnnnnnnnnnnnnnnnnnnnnnnnnnnnnnnnnnnnnnnnnnnnnnnnnnnnnnnnnnnnnnnnnnnnnnnnnnnnnnnnnnnnnnnnnnnnnnnnnnnnnnnnnnnnnnnnnnnnnnnnnnnnnnnnnnnnnnnnnnnnnnnnnnnnnnnnnnnnnnnnnnnnnnnnnnnnnnnnnnnnnnnnnnnnnnnnnnnnnnnnnnnnnnnnnnnnnnnnnnnnnnnnnnnnnnnnnnnnnnnnnnnnnnnnnnnnnnnnnnnnnnnnnnnnnnnnnnnnnnnnnnnnnnnnnnnnnnnnnnnnnnnnnnnnnnnnnnnnnnnnnnnnnnnnnnnnnnnnnnnnnnnnnnnnnnnnnnnnnnnnnnnnnnnnnnnnnnnnnnnnnnnnnnnnnnnnnnnnnnnnnnnnnnnnnnnnnnnnnnnnnnnnnnnnnnnnnnnnnnnnnnnnnnnnnnnnnnnnnnnnnnnnnnnnnnnnnnnnnnnnnnnnnnnnnnnnnnnnnnnnnnnnnnnnnnnnnnnnnnnnnnnnnnnnnnnnnnnnnnnnnnnnnnnnnnnnnnnnnnnnnnnnnnnnnnnnnnnnnnnnnnnnnnnnnnnnnnnnnnnnnnnnnnnnnnnnnnnnnnnnnnnnnnnnnnnnnnnnnnnnnnnnnnnnnnnnnnnnnnnnnnnnnnnnnnnnnnnnnnnnnnnnnnnnnnnnnnnnnnnnnnnnnnnnnnnnnnnnnnnnnnnnnnnnnnnnnnnnnnnnnnnnnnnnnnnnnnnnnnnnnnnnnnnnnnnnnnnnnnnnnnnnnnnnnnnnnnnnnnnnnnnnnnnnnnnnnnnnnnnnnnnnnnnnnnnnnnnnnnnnnnnnnnnnnnnnnnnnnnnnnnnnnnnnnnnnnnnnnnnnnnnnnnnnnnnnnnnnnnnnnnnnnnnnnnnnnnnnnnnnnnnnnnnnnnnnnnnnnnnnnnnnnnnnnnnnnnnnnnnnnnnnnnnnnnnnnnnnnnnnnnnnnnnnnnnnnnnnnnnnnnnnnnnnnnnnnnnnnnnnnnnnnnnnnnnnnnnnnnnnnnnnnnnnnnnnnnnnnnnnnnnnnnnnnnnnnnnnnnnnnnnnnnnnnnnnnnnnnnnnnnnnnnnnnnnnnnnnnnnnnnnnnnnnnnnnnnnnnnnnnnnnnnnnnnnnnnnnnnnnnnnnnnnnnnnnnnnnnnnnnnnnnnnnnnnnnnnnnnnnnnnnnnnnnnnnnnnnnnnnnnnnnnnnnnnnnnnnnnnnnnnnnnnnnnnnnnnnnnnnnnnnnnnnnnnnnnnnnnnnnnnnnnnnnnnnnnnnnnnnnnnnnnnnnnnnnnnnnnnnnnnnnnnnnnnnnnnnnnnnnnnnnnnnnnnnnnnnnnnnnnnnnnnnnnnnnnnnnnnnnnnnnnnnnnnnnnnnnnnnnnnnnnnnnnnnnnnnnnnnnnnnnnnnnnnnnnnnnnnnnnnnnnnnnnnnnnnnnnnnnnnnnnnnnnnnnnnnnnnnnnnnnnnnnnnnnnnnnnnnnnnnnnnnnnnnnnnnnnnnnnnnnnnnnnnnnnnnnnnnnnnnnnnnnnnnnnnnnnnnnnnnnnnnnnnnnnnnnnnnnnnnnnnnnnnnnnnnnnnnnnnnnnnnnnnnnnnnnnnnnnnnnnnnnnnnnnnnnnnnnnnnnnnnnnnnnnnnnnnnnnnnnnnnnnnnnnnnnnnnnnnnnnnnnnnnnnnnnnnnnnnnnnnnnnnnnnnnnnnnnnnnnnnnnnnnnnnnnnnnnnnnnnnnnnnnnnnnnnnnnnnnnnnnnnnnnnnnnnnnnnnnnnnnnnnnnnnnnnnnnnnnnnnnnnnnnnnnnnnnnnnnnnnnnnnnnnnnnnnnnnnnnnnnnnnnnnnnnnnnnnnnnnnnnnnnnnnnnnnnnnnnnnnnnnnnnnnnnnnnnnnnnnnnnnnnnnnnnnnnnnnnnnnnnnnnnnnnnnnnnnnnnnnnnnnnnnnnnnnnnnnnnnnnnnnnnnnnnnnnnnnnnnnnnnnnnnnnnnnnnnnnnnnnnnnnnnnnnnnnnnnnnnnnnnnnnnnnnnnnnnnnnnnnnnnnnnnnnnnnnnnnnnnnnnnnnnnnnnnnnnnnnnnnnnnnnnnnnnnnnnnnnnnnnnnnnnnnnnnnnnnnnnnnnnnnnnnnnnnnnnnnnnnnnnnnnnnnnnnnnnnnnnnnnnnnnnnnnnnnnnnnnnnnnnnnnnnnnnnnnnnnnnnnnnnnnnnnnnnnnnnnnnnnnnnnnnnnnnnnnnnnnnnnnnnnnnnnnnnnnnnnnnnnnnnnnnnnnnnnnnnnnnnnnnnnnnnnnnnnnnnnnnnnnnnnnnnnnnnnnnnnnnnnnnnnnnnnnnnnnnnnnnnnnnnnnnnnnnnnnnnnnnnnnnnnnnnnnnnnnnnnnnnnnnnnnnnnnnnnnnnnnnnnnnnnnnnnnnnnnnnnnnnnnnnnnnnnnnnnnnnnnnnnnnnnnnnnnnnnnnnnnnnnnnnnnnnnnnnnnnnnnnnnnnnnnnnnnnnnnnnnnnnnnnnnnnnnnnnnnnnnnnnnnnnnnnnnnnnnnnnnnnnnnnnnnnnnnnnnnnnnnnnnnnnnnnnnnnnnnnnnnnnnnnnnnnnnnnnnnnnnnnnnnnnnnnnnnnnnnnnnnnnnnnnnnnnnnnnnnnnnnnnnnnnnnnnnnnnnnnnnnnnnnnnnnnnnnnnnnnnnnnnnnnnnnnnnnnnnnnnnnnnnnnnnnnnnnnnnnnnnnnnnnnnnnnnnnnnnnnnnnnnnnnnnnnnnnnnnnnnnnnnnnnnnnnnnnnnnnnnnnnnnnnnnnnnnnnnnnnnnnnnnnnnnnnnnnnnnnnnnnnnnnnnnnnnnnnnnnnnnnnnnnnnnnnnnnnnnnnnnnnnnnnnnnnnnnnnnnnnnnnnnnnnnnnnnnnnnnnnnnnnnnnnnnnnnnnnnnnnnnnnnnnnnnnnnnnnnnnnnnnnnnnnnnnnnnnnnnnnnnnnnnnnnnnnnnnnnnnnnnnnnnnnnnnnnnnnnnnnnnnnnnnnnnnnnnnnnnnnnnnnnnnnnnnnnnnnnnnnnnnnnnnnnnnnnnnnnnnnnnnnnnnnnnnnnnnnnnnnnnnnnnnnnnnnnnnnnnnnnnnnnnnnnnnnnnnnnnnnnnnnnnnnnnnnnnnnnnnnnnnnnnnnnnnnnnnnnnnnnnnnnnnnnnnnnnnnnnnnnnnnnnnnnnnnnnnnnnnnnnnnnnnnnnnnnnnnnnnnnnnnnnnnnnnnnnnnnnnnnnnnnnnnnnnnnnnnnnnnnnnnnnnnnnnnnnnnnnnnnnnnnnnnnnnnnnnnnnnnnnnnnnnnnnnnnnnnnnnnnnnnnnnnnnnnnnnnnnnnnnnnnnnnnnnnnnnnnnnnnnnnnnnnnnnnnnnnnnnnnnnnnnnnnnnnnnnnnnnnnnnnnnnnnnnnnnnnnnnnnnnnnnnnnnnnnnnnnnnnnnnnnnnnnnnnnnnnnnnnnnnnnnnnnnnnnnnnnnnnnnnnnnnnnnnnnnnnnnnnnnnnnnnnnnnnnnnnnnnnnnnnnnnnnnnnnnnnnnnnnnnnnnnnnnnnnnnnnnnnnnnnnnnnnnnnnnnnnnnnnnnnnnnnnnnnnnnnnnnnnnnnnnnnnnnnnnnnnnnnnnnnnnnnnnnnnnnnnnnnnnnnnnnnnnnnnnnnnnnnnnnnnnnnnnnnnnnnnnnnnnnnnnnnnnnnnnnnnnnnnnnnnnnnnnnnnnnnnnnnnnnnnnnnnnnnnnnnnnnnnnnnnnnnnnnnnnnnnnnnnnnnnnnnnnnnnnnnnnnnnnnnnnnnnnnnnnnnnnnnnnnnnnnnnnnnnnnnnnnnnnnnnnnnnnnnnnnnnnnnnnnnnnnnnnnnnnnnnnnnnnnnnnnnnnnnnnnnnnnnnnnnnnnnnnnnnnnnnnnnnnnnnnnnnnnnnnnnnnnnnnnnnnnnnnnnnnnnnnnnnnnnnnnnnnnnnnnnnnnnnnnnnnnnnnnnnnnnnnnnnnnnnnnnnnnnnnnnnnnnnnnnnnnnnnnnnnnnnnnnnnnnnnnnnnnnnnnnnnnnnnnnnnnnnnnnnnnnnnnnnnnnnnnnnnnnnnnnnnnnnnnnnnnnnnnnnnnnnnnnnnnnnnnnnnnnnnnnnnnnnnnnnnnnnnnnnnnnnnnnnnnnnnnnnnnnnnnnnnnnnnnnnnnnnnnnnnnnnnnnnnnnnnnnnnnnnnnnnnnnnnnnnnnnnnnnnnnnnnnnnnnnnnnnnnnnnnnnnnnnnnnnnnnnnnnnnnnnnnnnnnnnnnnnnnnnnnnnnnnnnnnnnnnnnnnnnnnnnnnnnnnnnnnnnnnnnnnnnnnnnnnnnnnnnnnnnnnnnnnnnnnnnnnnnnnnnnnnnnnnnnnnnnnnnnnnnnnnnnnnnnnnnnnnnnnnnnnnnnnnnnnnnnnnnnnnnnnnnnnnnnnnnnnnnnnnnnnnnnnnnnnnnnnnnnnnnnnnnnnnnnnnnnnnnnnnnnnnnnnnnnnnnnnnnnnnnnnnnnnnnnnnnnnnnnnnnnnnnnnnnnnnnnnnnnnnnnnnnnnnnnnnnnnnnnnnnnnnnnnnnnnnnnnnnnnnnnnnnnnnnnnnnnnnnnnnnnnnnnnnnnnnnnnnnnnnnnnnnnnnnnnnnnnnnnnnnnnnnnnnnnnnnnnnnnnnnnnnnnnnnnnnnnnnnnnnnnnnnnnnnnnnnnnnnnnnnnnnnnnnnnnnnnnnnnnnnnnnnnnnnnnnnnnnnnnnnnnnnnnnnnnnnnnnnnnnnnnnnnnnnnnnnnnnnnnnnnnnnnnnnnnnnnnnnnnnnnnnnnnnnnnnnnnnnnnnnnnnnnnnnnnnnnnnnnnnnnnnnnnnnnnnnnnnnnnnnnnnnnnnnnnnnnnnnnnnnnnnnnnnnnnnnnnnnnnnnnnnnnnnnnnnnnnnnnnnnnnnnnnnnnnnnnnnnnnnnnnnnnnnnnnnnnnnnnnnnnnnnnnnnnnnnnnnnnnnnnnnnnnnnnnnnnnnnnnnnnnnnnnnnnnnnnnnnnnnnnnnnnnnnnnnnnnnnnnnnnnnnnnnnnnnnnnnnnnnnnnnnnnnnnnnnnnnnnnnnnnnnnnnnnnnnnnnnnnnnnnnnnnnnnnnnnnnnnnnnnnnnnnnnnnnnnnnnnnnnnnnnnnnnnnnnnnnnnnnnnnnnnnnnnnnnnnnnnnnnnnnnnnnnnnnnnnnnnnnnnnnnnnnnnnnnnnnnnnnnnnnnnnnnnnnnnnnnnnnnnnnnnnnnnnnnnnnnnnnnnnnnnnnnnnnnnnnnnnnnnnnnnnnnnnnnnnnnnnnnnnnnnnnnnnnnnnnnnnnnnnnnnnnnnnnnnnnnnnnnnnnnnnnnnnnnnnnnnnnnnnnnnnnnnnnnnnnnnnnnnnnnnnnnnnnnnnnnnnnnnnnnnnnnnnnnnnnnnnnnnnnnnnnnnnnnnnnnnnnnnnnnnnnnnnnnnnnnnnnnnnnnnnnnnnnnnnnnnnnnnnnnnnnnnnnnnnnnnnnnnnnnnnnnnnnnnnnnnnnnnnnnnnnnnnnnnnnnnnnnnnnnnnnnnnnnnnnnnnnnnnnnnnnnnnnnnnnnnnnnnnnnnnnnnnnnnnnnnnnnnnnnnnnnnnnnnnnnnnnnnnnnnnnnnnnnnnnnnnnnnnnnnnnnnnnnnnnnnnnnnnnnnnnnnnnnnnnnnnnnnnnnnnnnnnnnnnnnnnnnnnnnnnnnnnnnnnnnnnnnnnnnnnnnnnnnnnnnnnnnnnnnnnnnnnnnnnnnnnnnnnnnnnnnnnnnnnnnnnnnnnnnnnnnnnnnnnnnnnnnnnnnnnnnnnnnnnnnnnnnnnnnnnnnnnnnnnnnnnnnnnnnnnnnnnnnnnnnnnnnnnnnnnnnnnnnnnnnnnnnnnnnnnnnnnnnnnnnnnnnnnnnnnnnnnnnnnnnnnnnnnnnnnnnnnnnnnnnnnnnnnnnnnnnnnnnnnnnnnnnnnnnnnnnnnnnnnnnnnnnnnnnnnnnnnnnnnnnnnnnnnnnnnnnnnnnnnnnnnnnnnnnnnnnnnnnnnnnnnnnnnnnnnnnnnnnnnnnnnnnnnnnnnnnnnnnnnnnnnnnnnnnnnnnnnnnnnnnnnnnnnnnnnnnnnnnnnnnnnnnnnnnnnnnnnnnnnnnnnnnnnnnnnnnnnnnnnnnnnnnnnnnnnnnnnnnnnnnnnnnnnnnnnnnnnnnnnnnnnnnnnnnnnnnnnnnnnnnnnnnnnnnnnnnnnnnnnnnnnnnnnnnnnnnnnnnnnnnnnnnnnnnnnnnnnnnnnnnnnnnnnnnnnnnnnnnnnnnnnnnnnnnnnnnnnnnnnnnnnnnnnnnnnnnnnnnnnnnnnnnnnnnnnnnnnnnnnnnnnnnnnnnnnnnnnnnnnnnnnnnnnnnnnnnnnnnnnnnnnnnnnnnnnnnnnnnnnnnnnnnnnnnnnnnnnnnnnnnnnnnnnnnnnnnnnnnnnnnnnnnnnnnnnnnnnnnnnnnnnnnnnnnnnnnnnnnnnnnnnnnnnnnnnnnnnnnnnnnnnnnnnnnnnnnnnnnnnnnnnnnnnnnnnnnnnnnnnnnnnnnnnnnnnnnnnnnnnnnnnnnnnnnnnnnnnnnnnnnnnnnnnnnnnnnnnnnnnnnnnnnnnnnnnnnnnnnnnnnnnnnnnnnnnnnnnnnnnnnnnnnnnnnnnnnnnnnnnnnnnnnnnnnnnnnnnnnnnnnnnnnnnnnnnnnnnnnnnnnnnnnnnnnnnnnnnnnnnnnnnnnnnnnnnnnnnnnnnnnnnnnnnnnnnnnnnnnnnnnnnnnnnnnnnnnnnnnnnnnnnnnnnnnnnnnnnnnnnnnnnnnnnnnnnnnnnnnnnnnnnnnnnnnnnnnnnnnnnnnnnnnnnnnnnnnnnnnnnnnnnnnnnnnnnnnnnnnnnnnnnnnnnnnnnnnnnnnnnnnnnnnnnnnnnnnnnnnnnnnnnnnnnnnnnnnnnnnnnnnnnnnnnnnnnnnnnnnnnnnnnnnnnnnnnnnnnnnnnnnnnnnnnnnnnnnnnnnnnnnnnnnnnnnnnnnnnnnnnnnnnnnnnnnnnnnnnnnnnnnnnnnnnnnnnnnnnnnnnnnnnnnnnnnnnnnnnnnnnnnnnnnnnnnnnnnnnnnnnnnnnnnnnnnnnnnnnnnnnnnnnnnnnnnnnnnnnnnnnnnnnnnnnnnnnnnnnnnnnnnnnnnnnnnnnnnnnnnnnnnnnnnnnnnnnnnnnnnnnnnnnnnnnnnnnnnnnnnnnnnnnnnnnnnnnnnnnnnnnnnnnnnnnnnnnnnnnnnnnnnnnnnnnnnnnnnnnnnnnnnnnnnnnnnnnnnnnnnnnnnnnnnnnnnnnnnnnnnnnnnnnnnnnnnnnnnnnnnnnnnnnnnnnnnnnnnnnnnnnnnnnnnnnnnnnnnnnnnnnnnnnnnnnnnnnnnnnnnnnnnnnnnnnnnnnnnnnnnnnnnnnnnnnnnnnnnnnnnnnnnnnnnnnnnnnnnnnnnnnnnnnnnnnnnnnnnnnnnnnnnnnnnnnnnnnnnnnnnnnnnnnnnnnnnnnnnnnnnnnnnnnnnnnnnnnnnnnnnnnnnnnnnnnnnnnnnnnnnnnnnnnnnnnnnnnnnnnnnnnnnnnnnnnnnnnnnnnnnnnnnnnnnnnnnnnnnnnnnnnnnnnnnnnnnnnnnnnnnnnnnnnnnnnnnnnnnnnnnnnnnnnnnnnnnnnnnnnnnnnnnnnnnnnnnnnnnnnnnnnnnnnnnnnnnnnnnnnnnnnnnnnnnnnnnnnnnnnnnnnnnnnnnnnnnnnnnnnnnnnnnnnnnnnnnnnnnnnnnnnnnnnnnnnnnnnnnnnnnnnnnnnnnnnnnnnnnnnnnnnnnnnnnnnnnnnnnnnnnnnnnnnnnnnnnnnnnnnnnnnnnnnnnnnnnnnnnnnnnnnnnnnnnnnnnnnnnnnnnnnnnnnnnnnnnnnnnnnnnnnnnnnnnnnnnnnnnnnnnnnnnnnnnnnnnnnnnnnnnnnnnnnnnnnnnnnnnnnnnnnnnnnnnnnnnnnnnnnnnnnnnnnnnnnnnnnnnnnnnnnnnnnnnnnnnnnnnnnnnnnnnnnnnnnnnnnnnnnnnnnnnnnnnnnnnnnnnnnnnnnnnnnnnnnnnnnnnnnnnnnnnnnnnnnnnnnnnnnnnnnnnnnnnnnnnnnnnnnnnnnnnnnnnnnnnnnnnnnnnnnnnnnnnnnnnnnnnnnnnnnnnnnnnnnnnnnnnnnnnnnnnnnnnnnnnnnnnnnnnnnnnnnnnnnnnnnnnnnnnnnnnnnnnnnnnnnnnnnnnnnnnnnnnnnnnnnnnnnnnnnnnnnnnnnnnnnnnnnnnnnnnnnnnnnnnnnnnnnnnnnnnnnnnnnnnnnnnnnnnnnnnnnnnnnnnnnnnnnnnnnnnnnnnnnnnnnnnnnnnnnnnnnnnnnnnnnnnnnnnnnnnnnnnnnnnnnnnnnnnnnnnnnnnnnnnnnnnnnnnnnnnnnnnnnnnnnnnnnnnnnnnnnnnnnnnnnnnnnnnnnnnnnnnnnnnnnnnnnnnnnnnnnnnnnnnnnnnnnnnnnnnnnnnnnnnnnnnnnnnnnnnnnnnnnnnnnnnnnnnnnnnnnnnnnnnnnnnnnnnnnnnnnnnnnnnnnnnnnnnnnnnnnnnnnnnnnnnnnnnnnnnnnnnnnnnnnnnnnnnnnnnnnnnnnnnnnnnnnnnnnnnnnnnnnnnnnnnnnnnnnnnnnnnnnnnnnnnnnnnnnnnnnnnnnnnnnnnnnnnnnnnnnnnnnnnnnnnnnnnnnnnnnnnnnnnnnnnnnnnnnnnnnnnnnnnnnnnnnnnnnnnnnnnnnnnnnnnnnnnnnnnnnnnnnnnnnnnnnnnnnnnnnnnnnnnnnnnnnnnnnnnnnnnnnnnnnnnnnnnnnnnnnnnnnnnnnnnnnnnnnnnnnnnnnnnnnnnnnnnnnnnnnnnnnnnnnnnnnnnnnnnnnnnnnnnnnnnnnnnnnnnnnnnnnnnnnnnnnnnnnnnnnnnnnnnnnnnnnnnnnnnnnnnnnnnnnnnnnnnnnnnnnnnnnnnnnnnnnnnnnnnnnnnnnnnnnnnnnnnnnnnnnnnnnnnnnnnnnnnnnnnnnnnnnnnnnnnnnnnnnnnnnnnnnnnnnnnnnnnnnnnnnnnnnnnnnnnnnnnnnnnnnnnnnnnnnnnnnnnnnnnnnnnnnnnnnnnnnnnnnnnnnnnnnnnnnnnnnnnnnnnnnnnnnnnnnnnnnnnnnnnnnnnnnnnnnnnnnnnnnnnnnnnnnnnnnnnnnnnnnnnnnnnnnnnnnnnnnnnnnnnnnnnnnnnnnnnnnnnnnnnnnnnnnnnnnnnnnnnnnnnnnnnnnnnnnnnnnnnnnnnnnnnnnnnnnnnnnnnnnnnnnnnnnnnnnnnnnnnnnnnnnnnnnnnnnnnnnnnnnnnnnnnnnnnnnnnnnnnnnnnnnnnnnnnnnnnnnnnnnnnnnnnnnnnnnnnnnnnnnnnnnnnnnnnnnnnnnnnnnnnnnnnnnnnnnnnnnnnnnnnnnnnnnnnnnnnnnnnnnnnnnnnnnnnnnnnnnnnnnnnnnnnnnnnnnnnnnnnnnnnnnnnnnnnnnnnnnnnnnnnnnnnnnnnnnnnnnnnnnnnnnnnnnnnnnnnnnnnnnnnnnnnnnnnnnnnnnnnnnnnnnnnnnnnnnnnnnnnnnnnnnnnnnnnnnnnnnnnnnnnnnnnnnnnnnnnnnnnnnnnnnnnnnnnnnnnnnnnnnnnnnnnnnnnnnnnnnnnnnnnnnnnnnnnnnnnnnnnnnnnnnnnnnnnnnnnnnnnnnnnnnnnnnnnnnnnnnnnnnnnnnnnnnnnnnnnnnnnnnnnnnnnnnnnnnnnnnnnnnnnnnnnnnnnnnnnnnnnnnnnnnnnnnnnnnnnnnnnnnnnnnnnnnnnnnnnnnnnnnnnnnnnnnnnnnnnnnnnnnnnnnnnnnnnnnnnnnnnnnnnnnnnnnnnnnnnnnnnnnnnnnnnnnnnnnnnnnnnnnnnnnnnnnnnnnnnnnnnnnnnnnnnnnnnnnnnnnnnnnnnnnnnnnnnnnnnnnnnnnnnnnnnnnnnnnnnnnnnnnnnnnnnnnnnnnnnnnnnnnnnnnnnnnnnnnnnnnnnnnnnnnnnnnnnnnnnnnnnnnnnnnnnnnnnnnnnnnnnnnnnnnnnnnnnnnnnnnnnnnnnnnnnnnnnnnnnnnnnnnnnnnnnnnnnnnnnnnnnnnnnnnnnnnnnnnnnnnnnnnnnnnnnnnnnnnnnnnnnnnnnnnnnnnnnnnnnnnnnnnnnnnnnnnnnnnnnnnnnnnnnnnnnnnnnnnnnnnnnnnnnnnnnnnnnnnnnnnnnnnnnnnnnnnnnnnnnnnnnnnnnnnnnnnnnnnnnnnnnnnnnnnnnnnnnnnnnnnnnnnnnnnnnnnnnnnnnnnnnnnnnnnnnnnnnnnnnnnnnnnnnnnnnnnnnnnnnnnnnnnnnnnnnnnnnnnnnnnnnnnnnnnnnnnnnnnnnnnnnnnnnnnnnnnnnnnnnnnnnnnnnnnnnnnnnnnnnnnnnnnnnnnnnnnnnnnnnnnnnnnnnnnnnnnnnnnnnnnnnnnnnnnnnnnnnnnnnnnnnnnnnnnnnnnnnnnnnnnnnnnnnnnnnnnnnnnnnnnnnnnnnnnnnnnnnnnnnnnnnnnnnnnnnnnnnnnnnnnnnnnnnnnnnnnnnnnnnnnnnnnnnnnnnnnnnnnnnnnnnnnnnnnnnnnnnnnnnnnnnnnnnnnnnnnnnnnnnnnnnnnnnnnnnnnnnnnnnnnnnnnnnnnnnnnnnnnnnnnnnnnnnnnnnnnnnnnnnnnnnnnnnnnnnnnnnnnnnnnnnnnnnnnnnnnnnnnnnnnnnnnnnnnnnnnnnnnnnnnnnnnnnnnnnnnnnnnnnnnnnnnnnnnnnnnnnnnnnnnnnnnnnnnnnnnnnnnnnnnnnnnnnnnnnnnnnnnnnnnnnnnnnnnnnnnnnnnnnnnnnnnnnnnnnnnnnnnnnnnnnnnnnnnnnnnnnnnnnnnnnnnnnnnnnnnnnnnnnnnnnnnnnnnnnnnnnnnnnnnnnnnnnnnnnnnnnnnnnnnnnnnnnnnnnnnnnnnnnnnnnnnnnnnnnnnnnnnnnnnnnnnnnnnnnnnnnnnnnnnnnnnnnnnnnnnnnnnnnnnnnnnnnnnnnnnnnnnnnnnnnnnnnnnnnnnnnnnnnnnnnnnnnnnnnnnnnnnnnnnnnnnnnnnnnnnnnnnnnnnnnnnnnnnnnnnnnnnnnnnnnnnnnnnnnnnnnnnnnnnnnnnnnnnnnnnnnnnnnnnnnnnnnnnnnnnnnnnnnnnnnnnnnnnnnnnnnnnnnnnnnnnnnnnnnnnnnnnnnnnnnnnnnnnnnnnnnnnnnnnnnnnnnnnnnnnnnnnnnnnnnnnnnnnnnnnnnnnnnnnnnnnnnnnnnnnnnnnnnnnnnnnnnnnnnnnnnnnnnnnnnnnnnnnnnnnnnnnnnnnnnnnnnnnnnnnnnnnnnnnnnnnnnnnnnnnnnnnnnnnnnnnnnnnnnnnnnnnnnnnnnnnnnnnnnnnnnnnnnnnnnnnnnnnnnnnnnnnnnnnnnnnnnnnnnnnnnnnnnnnnnnnnnnnnnnnnnnnnnnnnnnnnnnnnnnnnnnnnnnnnnnnnnnnnnnnnnnnnnnnnnnnnnnnnnnnnnnnnnnnnnnnnnnnnnnnnnnnnnnnnnnnnnnnnnnnnnnnnnnnnnnnnnnnnnnnnnnnnnnnnnnnnnnnnnnnnnnnnnnnnnnnnnnnnnnnnnnnnnnnnnnnnnnnnnnnnnnnnnnnnnnnnnnnnnnnnnnnnnnnnnnnnnnnnnnnnnnnnnnnnnnnnnnnnnnnnnnnnnnnnnnnnnnnnnnnnnnnnnnnnnnnnnnnnnnnnnnnnnnnnnnnnnnnnnnnnnnnnnnnnnnnnnnnnnnnnnnnnnnnnnnnnnnnnnnnnnnnnnnnnnnnnnnnnnnnnnnnnnnnnnnnnnnnnnnnnnnnnnnnnnnnnnnnnnnnnnnnnnnnnnnnnnnnnnnnnnnnnnnnnnnnnnnnnnnnnnnnnnnnnnnnnnnnnnnnnnnnnnnnnnnnnnnnnnnnnnnnnnnnnnnnnnnnnnnnnnnnnnnnnnnnnnnnnnnnnnnnnnnnnnnnnnnnnnnnnnnnnnnnnnnnnnnnnnnnnnnnnnnnnnnnnnnnnnnnnnnnnnnnnnnnnnnnnnnnnnnnnnnnnnnnnnnnnnnnnnnnnnnnnnnnnnnnnnnnnnnnnnnnnnnnnnnnnnnnnnnnnnnnnnnnnnnnnnnnnnnnnnnnnnnnnnnnnnnnnnnnnnnnnnnnnnnnnnnnnnnnnnnnnnnnnnnnnnnnnnnnnnnnnnnnnnnnnnnnnnnnnnnnnnnnnnnnnnnnnnnnnnnnnnnnnnnnnnnnnnnnnnnnnnnnnnnnnnnnnnnnnnnnnnnnnnnnnnnnnnnnnnnnnnnnnnnnnnnnnnnnnnnnnnnnnnnnnnnnnnnnnnnnnnnnnnnnnnnnnnnnnnnnnnnnnnnnnnnnnnnnnnnnnnnnnnnnnnnnnnnnnnnnnnnnnnnnnnnnnnnnnnnnnnnnnnnnnnnnnnnnnnnnnnnnnnnnnnnnnnnnnnnnnnnnnnnnnnnnnnnnnnnnnnnnnnnnnnnnnnnnnnnnnnnnnnnnnnnnnnnnnnnnnnnnnnnnnnnnnnnnnnnnnnnnnnnnnnnnnnnnnnnnnnnnnnnnnnnnnnnnnnnnnnnnnnnnnnnnnnnnnnnnnnnnnnnnnnnnnnnnnnnnnnnnnnnnnnnnnnnnnnnnnnnnnnnnnnnnnnnnnnnnnnnnnnnnnnnnnnnnnnnnnnnnnnnnnnnnnnnnnnnnnnnnnnnnnnnnnnnnnnnnnnnnnnnnnnnnnnnnnnnnnnnnnnnnnnnnnnnnnnnnnnnnnnnnnnnnnnnnnnnnnnnnnnnnnnnnnnnnnnnnnnnnnnnnnnnnnnnnnnnnnnnnnnnnnnnnnnnnnnnnnnnnnnnnnnnnnnnnnnnnnnnnnnnnnnnnnnnnnnnnnnnnnnnnnnnnnnnnnnnnnnnnnnnnnnnnnnnnnnnnnnnnnnnnnnnnnnnnnnnnnnnnnnnnnnnnnnnnnnnnnnnnnnnnnnnnnnnnnnnnnnnnnnnnnnnnnnnnnnnnnnnnnnnnnnnnnnnnnnnnnnnnnnnnnnnnnnnnnnnnnnnnnnnnnnnnnnnnnnnnnnnnnnnnnnnnnnnnnnnnnnnnnnnnnnnnnnnnnnnnnnnnnnnnnnnnnnnnnnnnnnnnnnnnnnnnnnnnnnnnnnnnnnnnnnnnnnnnnnnnnnnnnnnnnnnnnnnnnnnnnnnnnnnnnnnnnnnnnnnnnnnnnnnnnnnnnnnnnnnnnnnnnnnnnnnnnnnnnnnnnnnnnnnnnnnnnnnnnnnnnnnnnnnnnnnnnnnnnnnnnnnnnnnnnnnnnnnnnnnnnnnnnnnnnnnnnnnnnnnnnnnnnnnnnnnnnnnnnnnnnnnnnnnnnnnnnnnnnnnnnnnnnnnnnnnnnnnnnnnnnnnnnnnnnnnnnnnnnnnnnnnnnnnnnnnnnnnnnnnnnnnnnnnnnnnnnnnnnnnnnnnnnnnnnnnnnnnnnnnnnnnnnnnnnnnnnnnnnnnnnnnnnnnnnnnnnnnnnnnnnnnnnnnnnnnnnnnnnnnnnnnnnnnnnnnnnnnnnnnnnnnnnnnnnnnnnnnnnnnnnnnnnnnnnnnnnnnnnnnnnnnnnnnnnnnnnnnnnnnnnnnnnnnnnnnnnnnnnnnnnnnnnnnnnnnnnnnnnnnnnnnnnnnnnnnnnnnnnnnnnnnnnnnnnnnnnnnnnnnnnnnnnnnnnnnnnnnnnnnnnnnnnnnnnnnnnnnnnnnnnnnnnnnnnnnnnnnnnnnnnnnnnnnnnnnnnnnnnnnnnnnnnnnnnnnnnnnnnnnnnnnnnnnnnnnnnnnnnnnnnnnnnnnnnnnnnnnnnnnnnnnnnnnnnnnnnnnnnnnnnnnnnnnnnnnnnnnnnnnnnnnnnnnnnnnnnnnnnnnnnnnnnnnnnnnnnnnnnnnnnnnnnnnnnnnnnnnnnnnnnnnnnnnnnnnnnnnnnnnnnnnnnnnnnnnnnnnnnnnnnnnnnnnnnnnnnnnnnnnnnnnnnnnnnnnnnnnnnnnnnnnnnnnnnnnnnnnnnnnnnnnnnnnnnnnnnnnnnnnnnnnnnnnnnnnnnnnnnnnnnnnnnnnnnnnnnnnnnnnnnnnnnnnnnnnnnnnnnnnnnnnnnnnnnnnnnnnnnnnnnnnnnnnnnnnnnnnnnnnnnnnnnnnnnnnnnnnnnnnnnnnnnnnnnnnnnnnnnnnnnnnnnnnnnnnnnnnnnnnnnnnnnnnnnnnnnnnnnnnnnnnnnnnnnnnnnnnnnnnnnnnnnnnnnnnnnnnnnnnnnnnnnnnnnnnnnnnnnnnnnnnnnnnnnnnnnnnnnnnnnnnnnnnnnnnnnnnnnnnnnnnnnnnnnnnnnnnnnnnnnnnnnnnnnnnnnnnnnnnnnnnnnnnnnnnnnnnnnnnnnnnnnnnnnnnnnnnnnnnnnnnnnnnnnnnnnnnnnnnnnnnnnnnnnnnnnnnnnnnnnnnnnnnnnnnnnnnnnnnnnnnnnnnnnnnnnnnnnnnnnnnnnnnnnnnnnnnnnnnnnnnnnnnnnnnnnnnnnnnnnnnnnnnnnnnnnnnnnnnnnnnnnnnnnnnnnnnnnnnnnnnnnnnnnnnnnnnnnnnnnnnnnnnnnnnnnnnnnnnnnnnnnnnnnnnnnnnnnnnnnnnnnnnnnnnnnnnnnnnnnnnnnnnnnnnnnnnnnnnnnnnnnnnnnnnnnnnnnnnnnnnnnnnnnnnnnnnnnnnnnnnnnnnnnnnnnnnnnnnnnnnnnnnnnnnnnnnnnnnnnnnnnnnnnnnnnnnnnnnnnnnnnnnnnnnnnnnnnnnnnnnnnnnnnnnnnnnnnnnnnnnnnnnnnnnnnnnnnnnnnnnnnnnnnnnnnnnnnnnnnnnnnnnnnnnnnnnnnnnnnnnnnnnnnnnnnnnnnnnnnnnnnnnnnnnnnnnnnnnnnnnnnnnnnnnnnnnnnnnnnnnnnnnnnnnnnnnnnnnnnnnnnnnnnnnnnnnnnnnnnnnnnnnnnnnnnnnnnnnnnnnnnnnnnnnnnnnnnnnnnnnnnnnnnnnnnnnnnnnnnnnnnnnnnnnnnnnnnnnnnnnnnnnnnnnnnnnnnnnnnnnnnnnnnnnnnnnnnnnnnnnnnnnnnnnnnnnnnnnnnnnnnnnnnnnnnnnnnnnnnnnnnnnnnnnnnnnnnnnnnnnnnnnnnnnnnnnnnnnnnnnnnnnnnnnnnnnnnnnnnnnnnnnnnnnnnnnnnnnnnnnnnnnnnnnnnnnnnnnnnnnnnnnnnnnnnnnnnnnnnnnnnnnnnnnnnnnnnnnnnnnnnnnnnnnnnnnnnnnnnnnnnnnnnnnnnnnnnnnnnnnnnnnnnnnnnnnnnnnnnnnnnnnnnnnnnnnnnnnnnnnnnnnnnnnnnnnnnnnnnnnnnnnnnnnnnnnnnnnnnnnnnnnnnnnnnnnnnnnnnnnnnnnnnnnnnnnnnnnnnnnnnnnnnnnnnnnnnnnnnnnnnnnnnnnnnnnnnnnnnnnnnnnnnnnnnnnnnnnnnnnnnnnnnnnnnnnnnnnnnnnnnnnnnnnnnnnnnnnnnnnnnnnnnnnnnnnnnnnnnnnnnnnnnnnnnnnnnnnnnnnnnnnnnnnnnnnnnnnnnnnnnnnnnnnnnnnnnnnnnnnnnnnnnnnnnnnnnnnnnnnnnnnnnnnnnnnnnnnnnnnnnnnnnnnnnnnnnnnnnnnnnnnnnnnnnnnnnnnnnnnnnnnnnnnnnnnnnnnnnnnnnnnnnnnnnnnnnnnnnnnnnnnnnnnnnnnnnnnnnnnnnnnnnnnnnnnnnnnnnnnnnnnnnnnnnnnnnnnnnnnnnnnnnnnnnnnnnnnnnnnnnnnnnnnnnnnnnnnnnnnnnnnnnnnnnnnnnnnnnnnnnnnnnnnnnnnnnnnnnnnnnnnnnnnnnnnnnnnnnnnnnnnnnnnnnnnnnnnnnnnnnnnnnnnnnnnnnnnnnnnnnnnnnnnnnnnnnnnnnnnnnnnnnnnnnnnnnnnnnnnnnnnnnnnnnnnnnnnnnnnnnnnnnnnnnnnnnnnnnnnnnnnnnnnnnnnnnnnnnnnnnnnnnnnnnnnnnnnnnnnnnnnnnnnnnnnnnnnnnnnnnnnnnnnnnnnnnnnnnnnnnnnnnnnnnnnnnnnnnnnnnnnnnnnnnnnnnnnnnnnnnnnnnnnnnnnnnnnnnnnnnnnnnnnnnnnnnnnnnnnnnnnnnnnnnnnnnnnnnnnnnnnnnnnnnnnnnnnnnnnnnnnnnnnnnnnnnnnnnnnnnnnnnnnnnnnnnnnnnnnnnnnnnnnnnnnnnnnnnnnnnnnnnnnnnnnnnnnnnnnnnnnnnnnnnnnnnnnnnnnnnnnnnnnnnnnnnnnnnnnnnnnnnnnnnnnnnnnnnnnnnnnnnnnnnnnnnnnnnnnnnnnnnnnnnnnnnnnnnnnnnnnnnnnnnnnnnnnnnnnnnnnnnnnnnnnnnnnnnnnnnnnnnnnnnnnnnnnnnnnnnnnnnnnnnnnnnnnnnnnnnnnnnnnnnnnnnnnnnnnnnnnnnnnnnnnnnnnnnnnnnnnnnnnnnnnnnnnnnnnnnnnnnnnnnnnnnnnnnnnnnnnnnnnnnnnnnnnnnnnnnnnnnnnnnnnnnnnnnnnnnnnnnnnnnnnnnnnnnnnnnnnnnnnnnnnnnnnnnnnnnnnnnnnnnnnnnnnnnnnnnnnnnnnnnnnnnnnnnnnnnnnnnnnnnnnnnnnnnnnnnnnnnnnnnnnnnnnnnnnnnnnnnnnnnnnnnnnnnnnnnnnnnnnnnnnnnnnnnnnnnnnnnnnnnnnnnnnnnnnnnnnnnnnnnnnnnnnnnnnnnnnnnnnnnnnnnnnnnnnnnnnnnnnnnnnnnnnnnnnnnnnnnnnnnnnnnnnnnnnnnnnnnnnnnnnnnnnnnnnnnnnnnnnnnnnnnnnnnnnnnnnnnnnnnnnnnnnnnnnnnnnnnnnnnnnnnnnnnnnnnnnnnnnnnnnnnnnnnnnnnnnnnnnnnnnnnnnnnnnnnnnnnnnnnnnnnnnnnnnnnnnnnnnnnnnnnnnnnnnnnnnnnnnnnnnnnnnnnnnnnnnnnnnnnnnnnnnnnnnnnnnnnnnnnnnnnnnnnnnnnnnnnnnnnnnnnnnnnnnnnnnnnnnnnnnnnnnnnnnnnnnnnnnnnnnnnnnnnnnnnnnnnnnnnnnnnnnnnnnnnnnnnnnnnnnnnnnnnnnnnnnnnnnnnnnnnnnnnnnnnnnnnnnnnnnnnnnnnnnnnnnnnnnnnnnnnnnnnnnnnnnnnnnnnnnnnnnnnnnnnnnnnnnnnnnnnnnnnnnnnnnnnnnnnnnnnnnnnnnnnnnnnnnnnnnnnnnnnnnnnnnnnnnnnnnnnnnnnnnnnnnnnnnnnnnnnnnnnnnnnnnnnnnnnnnnnnnnnnnnnnnnnnnnnnnnnnnnnnnnnnnnnnnnnnnnnnnnnnnnnnnnnnnnnnnnnnnnnnnnnnnnnnnnnnnnnnnnnnnnnnnnnnnnnnnnnnnnnnnnnnnnnnnnnnnnnnnnnnnnnnnnnnnnnnnnnnnnnnnnnnnnnnnnnnnnnnnnnnnnnnnnnnnnnnnnnnnnnnnnnnnnnnnnnnnnnnnnnnnnnnnnnnnnnnnnnnnnnnnnnnnnnnnnnnnnnnnnnnnnnnnnnnnnnnnnnnnnnnnnnnnnnnnnnnnnnnnnnnnnnnnnnnnnnnnnnnnnnnnnnnnnnnnnnnnnnnnnnnnnnnnnnnnnnnnnnnnnnnnnnnnnnnnnnnnnnnnnnnnnnnnnnnnnnnnnnnnnnnnnnnnnnnnnnnnnnnnnnnnnnnnnnnnnnnnnnnnnnnnnnnnnnnnnnnnnnnnnnnnnnnnnnnnnnnnnnnnnnnnnnnnnnnnnnnnnnnnnnnnnnnnnnnnnnnnnnnnnnnnnnnnnnnnnnnnnnnnnnnnnnnnnnnnnnnnnnnnnnnnnnnnnnnnnnnnnnnnnnnnnnnnnnnnnnnnnnnnnnnnnnnnnnnnnnnnnnnnnnnnnnnnnnnnnnnnnnnnnnnnnnnnnnnnnnnnnnnnnnnnnnnnnnnnnnnnnnnnnnnnnnnnnnnnnnnnnnnnnnnnnnnnnnnnnnnnnnnnnnnnnnnnnnnnnnnnnnnnnnnnnnnnnnnnnnnnnnnnnnnnnnnnnnnnnnnnnnnnnnnnnnnnnnnnnnnnnnnnnnnnnnnnnnnnnnnnnnnnnnnnnnnnnnnnnnnnnnnnnnnnnnnnnnnnnnnnnnnnnnnnnnnnnnnnnnnnnnnnnnnnnnnnnnnnnnnnnnnnnnnnnnnnnnnnnnnnnnnnnnnnnnnnnnnnnnnnnnnnnnnnnnnnnnnnnnnnnnnnnnnnnnnnnnnnnnnnnnnnnnnnnnnnnnnnnnnnnnnnnnnnnnnnnnnnnnnnnnnnnnnnnnnnnnnnnnnnnnnnnnnnnnnnnnnnnnnnnnnnnnnnnnnnnnnnnnnnnnnnnnnnnnnnnnnnnnnnnnnnnnnnnnnnnnnnnnnnnnnnnnnnnnnnnnnnnnnnnnnnnnnnnnnnnnnnnnnnnnnnnnnnnnnnnnnnnnnnnnnnnnnnnnnnnnnnnnnnnnnnnnnnnnnnnnnnnnnnnnnnnnnnnnnnnnnnnnnnnnnnnnnnnnnnnnnnnnnnnnnnnnnnnnnnnnnnnnnnnnnnnnnnnnnnnnnnnnnnnnnnnnnnnnnnnnnnnnnnnnnnnnnnnnnnnnnnnnnnnnnnnnnnnnnnnnnnnnnnnnnnnnnnnnnnnnnnnnnnnnnnnnnnnnnnnnnnnnnnnnnnnnnnnnnnnnnnnnnnnnnnnnnnnnnnnnnnnnnnnnnnnnnnnnnnnnnnnnnnnnnnnnnnnnnnnnnnnnnnnnnnnnnnnnnnnnnnnnnnnnnnnnnnnnnnnnnnnnnnnnnnnnnnnnnnnnnnnnnnnnnnnnnnnnnnnnnnnnnnnnnnnnnnnnnnnnnnnnnnnnnnnnnnnnnnnnnnnnnnnnnnnnnnnnnnnnnnnnnnnnnnnnnnnnnnnnnnnnnnnnnnnnnnnnnnnnnnnnnnnnnnnnnnnnnnnnnnnnnnnnnnnnnnnnnnnnnnnnnnnnnnnnnnnnnnnnnnnnnnnnnnnnnnnnnnnnnnnnnnnnnnnnnnnnnnnnnnnnnnnnnnnnnnnnnnnnnnnnnnnnnnnnnnnnnnnnnnnnnnnnnnnnnnnnnnnnnnnnnnnnnnnnnnnnnnnnnnnnnnnnnnnnnnnnnnnnnnnnnnnnnnnnnnnnnnnnnnnnnnnnnnnnnnnnnnnnnnnnnnnnnnnnnnnnnnnnnnnnnnnnnnnnnnnnnnnnnnnnnnnnnnnnnnnnnnnnnnnnnnnnnnnnnnnnnnnnnnnnnnnnnnnnnnnnnnnnnnnnnnnnnnnnnnnnnnnnnnnnnnnnnnnnnnnnnnnnnnnnnnnnnnnnnnnnnnnnnnnnnnnnnnnnnnnnnnnnnnnnnnnnnnnnnnnnnnnnnnnnnnnnnnnnnnnnnnnnnnnnnnnnnnnnnnnnnnnnnnnnnnnnnnnnnnnnnnnnnnnnnnnnnnnnnnnnnnnnnnnnnnnnnnnnnnnnnnnnnnnnnnnnnnnnnnnnnnnnnnnnnnnnnnnnnnnnnnnnnnnnnnnnnnnnnnnnnnnnnnnnnnnnnnnnnnnnnnnnnnnnnnnnnnnnnnnnnnnnnnnnnnnnnnnnnnnnnnnnnnnnnnnnnnnnnnnnnnnnnnnnnnnnnnnnnnnnnnnnnnnnnnnnnnnnnnnnnnnnnnnnnnnnnnnnnnnnnnnnnnnnnnnnnnnnnnnnnnnnnnnnnnnnnnnnnnnnnnnnnnnnnnnnnnnnnnnnnnnnnnnnnnnnnnnnnnnnnnnnnnnnnnnnnnnnnnnnnnnnnnnnnnnnnnnnnnnnnnnnnnnnnnnnnnnnnnnnnnnnnnnnnnnnnnnnnnnnnnnnnnnnnnnnnnnnnnnnnnnnnnnnnnnnnnnnnnnnnnnnnnnnnnnnnnnnnnnnnnnnnnnnnnnnnnnnnnnnnnnnnnnnnnnnnnnnnnnnnnnnnnnnnnnnnnnnnnnnnnnnnnnnnnnnnnnnnnnnnnnnnnnnnnnnnnnnnnnnnnnnnnnnnnnnnnnnnnnnnnnnnnnnnnnnnnnnnnnnnnnnnnnnnnnnnnnnnnnnnnnnnnnnnnnnnnnnnnnnnnnnnnnnnnnnnnnnnnnnnnnnnnnnnnnnnnnnnnnnnnnnnnnnnnnnnnnnnnnnnnnnnnnnnnnnnnnnnnnnnnnnnnnnnnnnnnnnnnnnnnnnnnnnnnnnnnnnnnnnnnnnnnnnnnnnnnnnnnnnnnnnnnnnnnnnnnnnnnnnnnnnnnnnnnnnnnnnnnnnnnnnnnnnnnnnnnnnnnnnnnnnnnnnnnnnnnnnnnnnnnnnnnnnnnnnnnnnnnnnnnnnnnnnnnnnnnnnnnnnnnnnnnnnnnnnnnnnnnnnnnnnnnnnnnnnnnnnnnnnnnnnnnnnnnnnnnnnnnnnnnnnnnnnnnnnnnnnnnnnnnnnnnnnnnnnnnnnnnnnnnnnnnnnnnnnnnnnnnnnnnnnnnnnnnnnnnnnnnnnnnnnnnnnnnnnnnnnnnnnnnnnnnnnnnnnnnnnnnnnnnnnnnnnnnnnnnnnnnnnnnnnnnnnnnnnnnnnnnnnnnnnnnnnnnnnnnnnnnnnnnnnnnnnnnnnnnnnnnnnnnnnnnnnnnnnnnnnnnnnnnnnnnnnnnnnnnnnnnnnnnnnnnnnnnnnnnnnnnnnnnnnnnnnnnnnnnnnnnnnnnnnnnnnnnnnnnnnnnnnnnnnnnnnnnnnnnnnnnnnnnnnnnnnnnnnnnnnnnnnnnnnnnnnnnnnnnnnnnnnnnnnnnnnnnnnnnnnnnnnnnnnnnnnnnnnnnnnnnnnnnnnnnnnnnnnnnnnnnnnnnnnnnnnnnnnnnnnnnnnnnnnnnnnnnnnnnnnnnnnnnnnnnnnnnnnnnnnnnnnnnnnnnnnnnnnnnnnnnnnnnnnnnnnnnnnnnnnnnnnnnnnnnnnnnnnnnnnnnnnnnnnnnnnnnnnnnnnnnnnnnnnnnnnnnnnnnnnnnnnnnnnnnnnnnnnnnnnnnnnnnnnnnnnnnnnnnnnnnnnnnnnnnnnnnnnnnnnnnnnnnnnnnnnnnnnnnnnnnnnnnnnnnnnnnnnnnnnnnnnnnnnnnnnnnnnnnnnnnnnnnnnnnnnnnnnnnnnnnnnnnnnnnnnnnnnnnnnnnnnnnnnnnnnnnnnnnnnnnnnnnnnnnnnnnnnnnnnnnnnnnnnnnnnnnnnnnnnnnnnnnnnnnnnnnnnnnnnnnnnnnnnnnnnnnnnnnnnnnnnnnnnnnnnnnnnnnnnnnnnnnnnnnnnnnnnnnnnnnnnnnnnnnnnnnnnnnnnnnnnnnnnnnnnnnnnnnnnnnnnnnnnnnnnnnnnnnnnnnnnnnnnnnnnnnnnnnnnnnnnnnnnnnnnnnnnnnnnnnnnnnnnnnnnnnnnnnnnnnnnnnnnnnnnnnnnnnnnnnnnnnnnnnnnnnnnnnnnnnnnnnnnnnnnnnnnnnnnnnnnnnnnnnnnnnnnnnnnnnnnnnnnnnnnnnnnnnnnnnnnnnnnnnnnnnnnnnnnnnnnnnnnnnnnnnnnnnnnnnnnnnnnnnnnnnnnnnnnnnnnnnnnnnnnnnnnnnnnnnnnnnnnnnnnnnnnnnnnnnnnnnnnnnnnnnnnnnnnnnnnnnnnnnnnnnnnnnnnnnnnnnnnnnnnnnnnnnnnnnnnnnnnnnnnnnnnnnnnnnnnnnnnnnnnnnnnnnnnnnnnnnnnnnnnnnnnnnnnnnnnnnnnnnnnnnnnnnnnnnnnnnnnnnnnnnnnnnnnnnnnnnnnnnnnnnnnnnnnnnnnnnnnnnnnnnnnnnnnnnnnnnnnnnnnnnnnnnnnnnnnnnnnnnnnnnnnnnnnnnnnnnnnnnnnnnnnnnnnnnnnnnnnnnnnnnnnnnnnnnnnnnnnnnnnnnnnnnnnnnnnnnnnnnnnnnnnnnnnnnnnnnnnnnnnnnnnnnnnnnnnnnnnnnnnnnnnnnnnnnnnnnnnnnnnnnnnnnnnnnnnnnnnnnnnnnnnnnnnnnnnnnnnnnnnnnnnnnnnnnnnnnnnnnnnnnnnnnnnnnnnnnnnnnnnnnnnnnnnnnnnnnnnnnnnnnnnnnnnnnnnnnnnnnnnnnnnnnnnnnnnnnnnnnnnnnnnnnnnnnnnnnnnnnnnnnnnnnnnnnnnnnnnnnnnnnnnnnnnnnnnnnnnnnnnnnnnnnnnnnnnnnnnnnnnnnnnnnnnnnnnnnnnnnnnnnnnnnnnnnnnnnnnnnnnnnnnnnnnnnnnnnnnnnnnnnnnnnnnnnnnnnnnnnnnnnnnnnnnnnnnnnnnnnnnnnnnnnnnnnnnnnnnnnnnnnnnnnnnnnnnnnnnnnnnnnnnnnnnnnnnnnnnnnnnnnnnnnnnnnnnnnnnnnnnnnnnnnnnnnnnnnnnnnnnnnnnnnnnnnnnnnnnnnnnnnnnnnnnnnnnnnnnnnnnnnnnnnnnnnnnnnnnnnnnnnnnnnnnnnnnnnnnnnnnnnnnnnnnnnnnnnnnnnnnnnnnnnnnnnnnnnnnnnnnnnnnnnnnnnnnnnnnnnnnnnnnnnnnnnnnnnnnnnnnnnnnnnnnnnnnnnnnnnnnnnnnnnnnnnnnnnnnnnnnnnnnnnnnnnnnnnnnnnnnnnnnnnnnnnnnnnnnnnnnnnnnnnnnnnnnnnnnnnnnnnnnnnnnnnnnnnnnnnnnnnnnnnnnnnnnnnnnnnnnnnnnnnnnnnnnnnnnnnnnnnnnnnnnnnnnnnnnnnnnnnnnnnnnnnnnnnnnnnnnnnnnnnnnnnnnnnnnnnnnnnnnnnnnnnnnnnnnnnnnnnnnnnnnnnnnnnnnnnnnnnnnnnnnnnnnnnnnnnnnnnnnnnnnnnnnnnnnnnnnnnnnnnnnnnnnnnnnnnnnnnnnnnnnnnnnnnnnnnnnnnnnnnnnnnnnnnnnnnnnnnnnnnnnnnnnnnnnnnnnnnnnnnnnnnnnnnnnnnnnnnnnnnnnnnnnnnnnnnnnnnnnnnnnnnnnnnnnnnnnnnnnnnnnnnnnnnnnnnnnnnnnnnnnnnnnnnnnnnnnnnnnnnnnnnnnnnnnnnnnnnnnnnnnnnnnnnnnnnnnnnnnnnnnnnnnnnnnnnnnnnnnnnnnnnnnnnnnnnnnnnnnnnnnnnnnnnnnnnnnnnnnnnnnnnnnnnnnnnnnnnnnnnnnnnnnnnnnnnnnnnnnnnnnnnnnnnnnnnnnnnnnnnnnnnnnnnnnnnnnnnnnnnnnnnnnnnnnnnnnnnnnnnnnnnnnnnnnnnnnnnnnnnnnnnnnnnnnnnnnnnnnnnnnnnnnnnnnnnnnnnnnnnnnnnnnnnnnnnnnnnnnnnnnnnnnnnnnnnnnnnnnnnnnnnnnnnnnnnnnnnnnnnnnnnnnnnnnnnnnnnnnnnnnnnnnnnnnnnnnnnnnnnnnnnnnnnnnnnnnnnnnnnnnnnnnnnnnnnnnnnnnnnnnnnnnnnnnnnnnnnnnnnnnnnnnnnnnnnnnnnnnnnnnnnnnnnnnnnnnnnnnnnnnnnnnnnnnnnnnnnnnnnnnnnnnnnnnnnnnnnnnnnnnnnnnnnnnnnnnnnnnnnnnnnnnnnnnnnnnnnnnnnnnnnnnnnnnnnnnnnnnnnnnnnnnnnnnnnnnnnnnnnnnnnnnnnnnnnnnnnnnnnnnnnnnnnnnnnnnnnnnnnnnnnnnnnnnnnnnnnnnnnnnnnnnnnnnnnnnnnnnnnnnnnnnnnnnnnnnnnnnnnnnnnnnnnnnnnnnnnnnnnnnnnnnnnnnnnnnnnnnnnnnnnnnnnnnnnnnnnnnnnnnnnnnnnnnnnnnnnnnnnnnnnnnnnnnnnnnnnnnnnnnnnnnnnnnnnnnnnnnnnnnnnnnnnnnnnnnnnnnnnnnnnnnnnnnnnnnnnnnnnnnnnnnnnnnnnnnnnnnnnnnnnnnnnnnnnnnnnnnnnnnnnnnnnnnnnnnnnnnnnnnnnnnnnnnnnnnnnnnnnnnnnnnnnnnnnnnnnnnnnnnnnnnnnnnnnnnnnnnnnnnnnnnnnnnnnnnnnnnnnnnnnnnnnnnnnnnnnnnnnnnnnnnnnnnnnnnnnnnnnnnnnnnnnnnnnnnnnnnnnnnnnnnnnnnnnnnnnnnnnnnnnnnnnnnnnnnnnnnnnnnnnnnnnnnnnnnnnnnnnnnnnnnnnnnnnnnnnnnnnnnnnnnnnnnnnnnnnnnnnnnnnnnnnnnnnnnnnnnnnnnnnnnnnnnnnnnnnnnnnnnnnnnnnnnnnnnnnnnnnnnnnnnnnnnnnnnnnnnnnnnnnnnnnnnnnnnnnnnnnnnnnnnnnnnnnnnnnnnnnnnnnnnnnnnnnnnnnnnnnnnnnnnnnnnnnnnnnnnnnnnnnnnnnnnnnnnnnnnnnnnnnnnnnnnnnnnnnnnnnnnnnnnnnnnnnnnnnnnnnnnnnnnnnnnnnnnnnnnnnnnnnnnnnnnnnnnnnnnnnnnnnnnnnnnnnnnnnnnnnnnnnnnnnnnnnnnnnnnnnnnnnnnnnnnnnnnnnnnnnnnnnnnnnnnnnnnnnnnnnnnnnnnnnnnnnnnnnnnnnnnnnnnnnnnnnnnnnnnnnnnnnnnnnnnnnnnnnnnnnnnnnnnnnnnnnnnnnnnnnnnnnnnnnnnnnnnnnnnnnnnnnnnnnnnnnnnnnnnnnnnnnnnnnnnnnnnnnnnnnnnnnnnnnnnnnnnnnnnnnnnnnnnnnnnnnnnnnnnnnnnnnnnnnnnnnnnnnnnnnnnnnnnnnnnnnnnnnnnnnnnnnnnnnnnnnnnnnnnnnnnnnnnnnnnnnnnnnnnnnnnnnnnnnnnnnnnnnnnnnnnnnnnnnnnnnnnnnnnnnnnnnnnnnnnnnnnnnnnnnnnnnnnnnnnnnnnnnnnnnnnnnnnnnnnnnnnnnnnnnnnnnnnnnnnnnnnnnnnnnnnnnnnnnnnnnnnnnnnnnnnnnnnnnnnnnnnnnnnnnnnnnnnnnnnnnnnnnnnnnnnnnnnnnnnnnnnnnnnnnnnnnnnnnnnnnnnnnnnnnnnnnnnnnnnnnnnnnnnnnnnnnnnnnnnnnnnnnnnnnnnnnnnnnnnnnnnnnnnnnnnnnnnnnnnnnnnnnnnnnnnnnnnnnnnnnnnnnnnnnnnnnnnnnnnnnnnnnnnnnnnnnnnnnnnnnnnnnnnnnnnnnnnnnnnnnnnnnnnnnnnnnnnnnnnnnnnnnnnnnnnnnnnnnnnnnnnnnnnnnnnnnnnnnnnnnnnnnnnnnnnnnnnnnnnnnnnnnnnnnnnnnnnnnnnnnnnnnnnnnnnnnnnnnnnnnnnnnnnnnnnnnnnnnnnnnnnnnnnnnnnnnnnnnnnnnnnnnnnnnnnnnnnnnnnnnnnnnnnnnnnnnnnnnnnnnnnnnnnnnnnnnnnnnnnnnnnnnnnnnnnnnnnnnnnnnnnnnnnnnnnnnnnnnnnnnnnnnnnnnnnnnnnnnnnnnnnnnnnnnnnnnnnnnnnnnnnnnnnnnnnnnnnnnnnnnnnnnnnnnnnnnnnnnnnnnnnnnnnnnnnnnnnnnnnnnnnnnnnnnnnnnnnnnnnnnnnnnnnnnnnnnnnnnnnnnnnnnnnnnnnnnnnnnnnnnnnnnnnnnnnnnnnnnnnnnnnnnnnnnnnnnnnnnnnnnnnnnnnnnnnnnnnnnnnnnnnnnnnnnnnnnnnnnnnnnnnnnnnnnnnnnnnnnnnnnnnnnnnnnnnnnnnnnnnnnnnnnnnnnnnnnnnnnnnnnnnnnnnnnnnnnnnnnnnnnnnnnnnnnnnnnnnnnnnnnnnnnnnnnnnnnnnnnnnnnnnnnnnnnnnnnnnnnnnnnnnnnnnnnnnnnnnnnnnnnnnnnnnnnnnnnnnnnnnnnnnnnnnnnnnnnnnnnnnnnnnnnnnnnnnnnnnnnnnnnnnnnnnnnnnnnnnnnnnnnnnnnnnnnnnnnnnnnnnnnnnnnnnnnnnnnnnnnnnnnnnnnnnnnnnnnnnnnnnnnnnnnnnnnnnnnnnnnnnnnnnnnnnnnnnnnnnnnnnnnnnnnnnnnnnnnnnnnnnnnnnnnnnnnnnnnnnnnnnnnnnnnnnnnnnnnnnnnnnnnnnnnnnnnnnnnnnnnnnnnnnnnnnnnnnnnnnnnnnnnnnnnnnnnnnnnnnnnnnnnnnnnnnnnnnnnnnnnnnnnnnnnnnnnnnnnnnnnnnnnnnnnnnnnnnnnnnnnnnnnnnnnnnnnnnnnnnnnnnnnnnnnnnnnnnnnnnnnnnnnnnnnnnnnnnnnnnnnnnnnnnnnnnnnnnnnnnnnnnnnnnnnnnnnnnnnnnnnnnnnnnnnnnnnnnnnnnnnnnnnnnnnnnnnnnnnnnnnnnnnnnnnnnnnnnnnnnnnnnnnnnnnnnnnnnnnnnnnnnnnnnnnnnnnnnnnnnnnnnnnnnnnnnnnnnnnnnnnnnnnnnnnnnnnnnnnnnnnnnnnnnnnnnnnnnnnnnnnnnnnnnnnnnnnnnnnnnnnnnnnnnnnnnnnnnnnnnnnnnnnnnnnnnnnnnnnnnnnnnnnnnnnnnnnnnnnnnnnnnnnnnnnnnnnnnnnnnnnnnnnnnnnnnnnnnnnnnnnnnnnnnnnnnnnnnnnnnnnnnnnnnnnnnnnnnnnnnnnnnnnnnnnnnnnnnnnnnnnnnnnnnnnnnnnnnnnnnnnnnnnnnnnnnnnnnnnnnnnnnnnnnnnnnnnnnnnnnnnnnnnnnnnnnnnnnnnnnnnnnnnnnnnnnnnnnnnnnnnnnnnnnnnnnnnnnnnnnnnnnnnnnnnnnnnnnnnnnnnnnnnnnnnnnnnnnnnnnnnnnnnnnnnnnnnnnnnnnnnnnnnnnnnnnnnnnnnnnnnnnnnnnnnnnnnnnnnnnnnnnnnnnnnnnnnnnnnnnnnnnnnnnnnnnnnnnnnnnnnnnnnnnnnnnnnnnnnnnnnnnnnnnnnnnnnnnnnnnnnnnnnnnnnnnnnnnnnnnnnnnnnnnnnnnnnnnnnnnnnnnnnnnnnnnnnnnnnnnnnnnnnnnnnnnnnnnnnnnnnnnnnnnnnnnnnnnnnnnnnnnnnnnnnnnnnnnnnnnnnnnnnnnnnnnnnnnnnnnnnnnnnnnnnnnnnnnnnnnnnnnnnnnnnnnnnnnnnnnnnnnnnnnnnnnnnnnnnnnnnnnnnnnnnnnnnnnnnnnnnnnnnnnnnnnnnnnnnnnnnnnnnnnnnnnnnnnnnnnnnnnnnnnnnnnnnnnnnnnnnnnnnnnnnnnnnnnnnnnnnnnnnnnnnnnnnnnnnnnnnnnnnnnnnnnnnnnnnnnnnnnnnnnnnnnnnnnnnnnnnnnnnnnnnnnnnnnnnnnnnnnnnnnnnnnnnnnnnnnnnnnnnnnnnnnnnnnnnnnnnnnnnnnnnnnnnnnnnnnnnnnnnnnnnnnnnnnnnnnnnnnnnnnnnnnnnnnnnnnnnnnnnnnnnnnnnnnnnnnnnnnnnnnnnnnnnnnnnnnnnnnnnnnnnnnnnnnnnnnnnnnnnnnnnnnnnnnnnnnnnnnnnnnnnnnnnnnnnnnnnnnnnnnnnnnnnnnnnnnnnnnnnnnnnnnnnnnnnnnnnnnnnnnnnnnnnnnnnnnnnnnnnnnnnnnnnnnnnnnnnnnnnnnnnnnnnnnnnnnnnnnnnnnnnnnnnnnnnnnnnnnnnnnnnnnnnnnnnnnnnnnnnnnnnnnnnnnnnnnnnnnnnnnnnnnnnnnnnnnnnnnnnnnnnnnnnnnnnnnnnnnnnnnnnnnnnnnnnnnnnnnnnnnnnnnnnnnnnnnnnnnnnnnnnnnnnnnnnnnnnnnnnnnnnnnnnnnnnnnnnnnnnnnnnnnnnnnnnnnnnnnnnnnnnnnnnnnnnnnnnnnnnnnnnnnnnnnnnnnnnnnnnnnnnnnnnnnnnnnnnnnnnnnnnnnnnnnnnnnnnnnnnnnnnnnnnnnnnnnnnnnnnnnnnnnnnnnnnnnnnnnnnnnnnnnnnnnnnnnnnnnnnnnnnnnnnnnnnnnnnnnnnnnnnnnnnnnnnnnnnnnnnnnnnnnnnnnnnnnnnnnnnnnnnnnnnnnnnnnnnnnnnnnnnnnnnnnnnnnnnnnnnnnnnnnnnnnnnnnnnnnnnnnnnnnnnnnnnnnnnnnnnnnnnnnnnnnnnnnnnnnnnnnnnnnnnnnnnnnnnnnnnnnnnnnnnnnnnnnnnnnnnnnnnnnnnnnnnnnnnnnnnnnnnnnnnnnnnnnnnnnnnnnnnnnnnnnnnnnnnnnnnnnnnnnnnnnnnnnnnnnnnnnnnnnnnnnnnnnnnnnnnnnnnnnnnnnnnnnnnnnnnnnnnnnnnnnnnnnnnnnnnnnnnnnnnnnnnnnnnnnnnnnnnnnnnnnnnnnnnnnnnnnnnnnnnnnnnnnnnnnnnnnnnnnnnnnnnnnnnnnnnnnnnnnnnnnnnnnnnnnnnnnnnnnnnnnnnnnnnnnnnnnnnnnnnnnnnnnnnnnnnnnnnnnnnnnnnnnnnnnnnnnnnnnnnnnnnnnnnnnnnnnnnnnnnnnnnnnnnnnnnnnnnnnnnnnnnnnnnnnnnnnnnnnnnnnnnnnnnnnnnnnnnnnnnnnnnnnnnnnnnnnnnnnnnnnnnnnnnnnnnnnnnnnnnnnnnnnnnnnnnnnnnnnnnnnnnnnnnnnnnnnnnnnnnnnnnnnnnnnnnnnnnnnnnnnnnnnnnnnnnnnnnnnnnnnnnnnnnnnnnnnnnnnnnnnnnnnnnnnnnnnnnnnnnnnnnnnnnnnnnnnnnnnnnnnnnnnnnnnnnnnnnnnnnnnnnnnnnnnnnnnnnnnnnnnnnnnnnnnnnnnnnnnnnnnnnnnnnnnnnnnnnnnnnnnnnnnnnnnnnnnnnnnnnnnnnnnnnnnnnnnnnnnnnnnnnnnnnnnnnnnnnnnnnnnnnnnnnnnnnnnnnnnnnnnnnnnnnnnnnnnnnnnnnnnnnnnnnnnnnnnnnnnnnnnnnnnnnnnnnnnnnnnnnnnnnnnnnnnnnnnnnnnnnnnnnnnnnnnnnnnnnnnnnnnnnnnnnnnnnnnnnnnnnnnnnnnnnnnnnnnnnnnnnnnnnnnnnnnnnnnnnnnnnnnnnnnnnnnnnnnnnnnnnnnnnnnnnnnnnnnnnnnnnnnnnnnnnnnnnnnnnnnnnnnnnnnnnnnnnnnnnnnnnnnnnnnnnnnnnnnnnnnnnnnnnnnnnnnnnnnnnnnnnnnnnnnnnnnnnnnnnnnnnnnnnnnnnnnnnnnnnnnnnnnnnnnnnnnnnnnnnnnnnnnnnnnnnnnnnnnnnnnnnnnnnnnnnnnnnnnnnnnnnnnnnnnnnnnnnnnnnnnnnnnnnnnnnnnnnnnnnnnnnnnnnnnnnnnnnnnnnnnnnnnnnnnnnnnnnnnnnnnnnnnnnnnnnnnnnnnnnnnnnnnnnnnnnnnnnnnnnnnnnnnnnnnnnnnnnnnnnnnnnnnnnnnnnnnnnnnnnnnnnnnnnnnnnnnnnnnnnnnnnnnnnnnnnnnnnnnnnnnnnnnnnnnnnnnnnnnnnnnnnnnnnnnnnnnnnnnnnnnnnnnnnnnnnnnnnnnnnnnnnnnnnnnnnnnnnnnnnnnnnnnnnnnnnnnnnnnnnnnnnnnnnnnnnnnnnnnnnnnnnnnnnnnnnnnnnnnnnnnnnnnnnnnnnnnnnnnnnnnnnnnnnnnnnnnnnnnnnnnnnnnnnnnnnnnnnnnnnnnnnnnnnnnnnnnnnnnnnnnnnnnnnnnnnnnnnnnnnnnnnnnnnnnnnnnnnnnnnnnnnnnnnnnnnnnnnnnnnnnnnnnnnnnnnnnnnnnnnnnnnnnnnnnnnnnnnnnnnnnnnnnnnnnnnnnnnnnnnnnnnnnnnnnnnnnnnnnnnnnnnnnnnnnnnnnnnnnnnnnnnnnnnnnnnnnnnnnnnnnnnnnnnnnnnnnnnnnnnnnnnnnnnnnnnnnnnnnnnnnnnnnnnnnnnnnnnnnnnnnnnnnnnnnnnnnnnnnnnnnnnnnnnnnnnnnnnnnnnnnnnnnnnnnnnnnnnnnnnnnnnnnnnnnnnnnnnnnnnnnnnnnnnnnnnnnnnnnnnnnnnnnnnnnnnnnnnnnnnnnnnnnnnnnnnnnnnnnnnnnnnnnnnnnnnnnnnnnnnnnnnnnnnnnnnnnnnnnnnnnnnnnnnnnnnnnnnnnnnnnnnnnnnnnnnnnnnnnnnnnnnnnnnnnnnnnnnnnnnnnnnnnnnnnnnnnnnnnnnnnnnnnnnnnnnnnnnnnnnnnnnnnnnnnnnnnnnnnnnnnnnnnnnnnnnnnnnnnnnnnnnnnnnnnnnnnnnnnnnnnnnnnnnnnnnnnnnnnnnnnnnnnnnnnnnnnnnnnnnnnnnnnnnnnnnnnnnnnnnnnnnnnnnnnnnnnnnnnnnnnnnnnnnnnnnnnnnnnnnnnnnnnnnnnnnnnnnnnnnnnnnnnnnnnnnnnnnnnnnnnnnnnnnnnnnnnnnnnnnnnnnnnnnnnnnnnnnnnnnnnnnnnnnnnnnnnnnnnnnnnnnnnnnnnnnnnnnnnnnnnnnnnnnnnnnnnnnnnnnnnnnnnnnnnnnnnnnnnnnnnnnnnnnnnnnnnnnnnnnnnnnnnnnnnnnnnnnnnnnnnnnnnnnnnnnnnnnnnnnnnnnnnnnnnnnnnnnnnnnnnnnnnnnnnnnnnnnnnnnnnnnnnnnnnnnnnnnnnnnnnnnnnnnnnnnnnnnnnnnnnnnnnnnnnnnnnnnnnnnnnnnnnnnnnnnnnnnnnnnnnnnnnnnnnnnnnnnnnnnnnnnnnnnnnnnnnnnnnnnnnnnnnnnnnnnnnnnnnnnnnnnnnnnnnnnnnnnnnnnnnnnnnnnnnnnnnnnnnnnnnnnnnnnnnnnnnnnnnnnnnnnnnnnnnnnnnnnnnnnnnnnnnnnnnnnnnnnnnnnnnnnnnnnnnnnnnnnnnnnnnnnnnnnnnnnnnnnnnnnnnnnnnnnnnnnnnnnnnnnnnnnnnnnnnnnnnnnnnnnnnnnnnnnnnnnnnnnnnnnnnnnnnnnnnnnnnnnnnnnnnnnnnnnnnnnnnnnnnnnnnnnnnnnnnnnnnnnnnnnnnnnnnnnnnnnnnnnnnnnnnnnnnnnnnnnnnnnnnnnnnnnnnnnnnnnnnnnnnnnnnnnnnnnnnnnnnnnnnnnnnnnnnnnnnnnnnnnnnnnnnnnnnnnnnnnnnnnnnnnnnnnnnnnnnnnnnnnnnnnnnnnnnnnnnnnnnnnnnnnnnnnnnnnnnnnnnnnnnnnnnnnnnnnnnnnnnnnnnnnnnnnnnnnnnnnnnnnnnnnnnnnnnnnnnnnnnnnnnnnnnnnnnnnnnnnnnnnnnnnnnnnnnnnnnnnnnnnnnnnnnnnnnnnnnnnnnnnnnnnnnnnnnnnnnnnnnnnnnnnnnnnnnnnnnnnnnnnnnnnnnnnnnnnnnnnnnnnnnnnnnnnnnnnnnnnnnnnnnnnnnnnnnnnnnnnnnnnnnnnnnnnnnnnnnnnnnnnnnnnnnnnnnnnnnnnnnnnnnnnnnnnnnnnnnnnnnnnnnnnnnnnnnnnnnnnnnnnnnnnnnnnnnnnnnnnnnnnnnnnnnnnnnnnnnnnnnnnnnnnnnnnnnnnnnnnnnnnnnnnnnnnnnnnnnnnnnnnnnnnnnnnnnnnnnnnnnnnnnnnnnnnnnnnnnnnnnnnnnnnnnnnnnnnnnnnnnnnnnnnnnnnnnnnnnnnnnnnnnnnnnnnnnnnnnnnnnnnnnnnnnnnnnnnnnnnnnnnnnnnnnnnnnnnnnnnnnnnnnnnnnnnnnnnnnnnnnnnnnnnnnnnnnnnnnnnnnnnnnnnnnnnnnnnnnnnnnnnnnnnnnnnnnnnnnnnnnnnnnnnnnnnnnnnnnnnnnnnnnnnnnnnnnnnnnnnnnnnnnnnnnnnnnnnnnnnnnnnnnnnnnnnnnnnnnnnnnnnnnnnnnnnnnnnnnnnnnnnnnnnnnnnnnnnnnnnnnnnnnnnnnnnnnnnnnnnnnnnnnnnnnnnnnnnnnnnnnnnnnnnnnnnnnnnnnnnnnnnnnnnnnnnnnnnnnnnnnnnnnnnnnnnnnnnnnnnnnnnnnnnnnnnnnnnnnnnnnnnnnnnnnnnnnnnnnnnnnnnnnnnnnnnnnnnnnnnnnnnnnnnnnnnnnnnnnnnnnnnnnnnnnnnnnnnnnnnnnnnnnnnnnnnnnnnnnnnnnnnnnnnnnnnnnnnnnnnnnnnnnnnnnnnnnnnnnnnnnnnnnnnnnnnnnnnnnnnnnnnnnnnnnnnnnnnnnnnnnnnnnnnnnnnnnnnnnnnnnnnnnnnnnnnnnnnnnnnnnnnnnnnnnnnnnnnnnnnnnnnnnnnnnnnnnnnnnnnnnnnnnnnnnnnnnnnnnnnnnnnnnnnnnnnnnnnnnnnnnnnnnnnnnnnnnnnnnnnnnnnnnnnnnnnnnnnnnnnnnnnnnnnnnnnnnnnnnnnnnnnnnnnnnnnnnnnnnnnnnnnnnnnnnnnnnnnnnnnnnnnnnnnnnnnnnnnnnnnnnnnnnnnnnnnnnnnnnnnnnnnnnnnnnnnnnnnnnnnnnnnnnnnnnnnnnnnnnnnnnnnnnnnnnnnnnnnnnnnnnnnnnnnnnnnnnnnnnnnnnnnnnnnnnnnnnnnnnnnnnnnnnnnnnnnnnnnnnnnnnnnnnnnnnnnnnnnnnnnnnnnnnnnnnnnnnnnnnnnnnnnnnnnnnnnnnnnnnnnnnnnnnnnnnnnnnnnnnnnnnnnnnnnnnnnnnnnnnnnnnnnnnnnnnnnnnnnnnnnnnnnnnnnnnnnnnnnnnnnnnnnnnnnnnnnnnnnnnnnnnnnnnnnnnnnnnnnnnnnnnnnnnnnnnnnnnnnnnnnnnnnnnnnnnnnnnnnnnnnnnnnnnnnnnnnnnnnnnnnnnnnnnnnnnnnnnnnnnnnnnnnnnnnnnnnnnnnnnnnnnnnnnnnnnnnnnnnnnnnnnnnnnnnnnnnnnnnnnnnnnnnnnnnnnnnnnnnnnnnnnnnnnnnnnnnnnnnnnnnnnnnnnnnnnnnnnnnnnnnnnnnnnnnnnnnnnnnnnnnnnnnnnnnnnnnnnnnnnnnnnnnnnnnnnnnnnnnnnnnnnnnnnnnnnnnnnnnnnnnnnnnnnnnnnnnnnnnnnnnnnnnnnnnnnnnnnnnnnnnnnnnnnnnnnnnnnnnnnnnnnnnnnnnnnnnnnnnnnnnnnnnnnnnnnnnnnnnnnnnnnnnnnnnnnnnnnnnnnnnnnnnnnnnnnnnnnnnnnnnnnnnnnnnnnnnnnnnnnnnnnnnnnnnnnnnnnnnnnnnnnnnnnnnnnnnnnnnnnnnnnnnnnnnnnnnnnnnnnnnnnnnnnnnnnnnnnnnnnnnnnnnnnnnnnnnnnnnnnnnnnnnnnnnnnnnnnnnnnnnnnnnnnnnnnnnnnnnnnnnnnnnnnnnnnnnnnnnnnnnnnnnnnnnnnnnnnnnnnnnnnnnnnnnnnnnnnnnnnnnnnnnnnnnnnnnnnnnnnnnnnnnnnnnnnnnnnnnnnnnnnnnnnnnnnnnnnnnnnnnnnnnnnnnnnnnnnnnnnnnnnnnnnnnnnnnnnnnnnnnnnnnnnnnnnnnnnnnnnnnnnnnnnnnnnnnnnnnnnnnnnnnnnnnnnnnnnnnnnnnnnnnnnnnnnnnnnnnnnnnnnnnnnnnnnnnnnnnnnnnnnnnnnnnnnnnnnnnnnnnnnnnnnnnnnnnnnnnnnnnnnnnnnnnnnnnnnnnnnnnnnnnnnnnnnnnnnnnnnnnnnnnnnnnnnnnnnnnnnnnnnnnnnnnnnnnnnnnnnnnnnnnnnnnnnnnnnnnnnnnnnnnnnnnnnnnnnnnnnnnnnnnnnnnnnnnnnnnnnnnnnnnnnnnnnnnnnnnnnnnnnnnnnnnnnnnnnnnnnnnnnnnnnnnnnnnnnnnnnnnnnnnnnnnnnnnnnnnnnnnnnnnnnnnnnnnnnnnnnnnnnnnnnnnnnnnnnnnnnnnnnnnnnnnnnnnnnnnnnnnnnnnnnnnnnnnnnnnnnnnnnnnnnnnnnnnnnnnnnnnnnnnnnnnnnnnnnnnnnnnnnnnnnnnnnnnnnnnnnnnnnnnnnnnnnnnnnnnnnnnnnnnnnnnnnnnnnnnnnnnnnnnnnnnnnnnnnnnnnnnnnnnnnnnnnnnnnnnnnnnnnnnnnnnnnnnnnnnnnnnnnnnnnnnnnnnnnnnnnnnnnnnnnnnnnnnnnnnnnnnnnnnnnnnnnnnnnnnnnnnnnnnnnnnnnnnnnnnnnnnnnnnnnnnnnnnnnnnnnnnnnnnnnnnnnnnnnnnnnnnnnnnnnnnnnnnnnnnnnnnnnnnnnnnnnnnnnnnnnnnnnnnnnnnnnnnnnnnnnnnnnnnnnnnnnnnnnnnnnnnnnnnnnnnnnnnnnnnnnnnnnnnnnnnnnnnnnnnnnnnnnnnnnnnnnnnnnnnnnnnnnnnnnnnnnnnnnnnnnnnnnnnnnnnnnnnnnnnnnnnnnnnnnnnnnnnnnnnnnnnnnnnnnnnnnnnnnnnnnnnnnnnnnnnnnnnnnnnnnnnnnnnnnnnnnnnnnnnnnnnnnnnnnnnnnnnnnnnnnnnnnnnnnnnnnnnnnnnnnnnnnnnnnnnnnnnnnnnnnnnnnnnnnnnnnnnnnnnnnnnnnnnnnnnnnnnnnnnnnnnnnnnnnnnnnnnnnnnnnnnnnnnnnnnnnnnnnnnnnnnnnnnnnnnnnnnnnnnnnnnnnnnnnnnnnnnnnnnnnnnnnnnnnnnnnnnnnnnnnnnnnnnnnnnnnnnnnnnnnnnnnnnnnnnnnnnnnnnnnnnnnnnnnnnnnnnnnnnnnnnnnnnnnnnnnnnnnnnnnnnnnnnnnnnnnnnnnnnnnnnnnnnnnnnnnnnnnnnnnnnnnnnnnnnnnnnnnnnnnnnnnnnnnnnnnnnnnnnnnnnnnnnnnnnnnnnnnnnnnnnnnnnnnnnnnnnnnnnnnnnnnnnnnnnnnnnnnnnnnnnnnnnnnnnnnnnnnnnnnnnnnnnnnnnnnnnnnnnnnnnnnnnnnnnnnnnnnnnnnnnnnnnnnnnnnnnnnnnnnnnnnnnnnnnnnnnnnnnnnnnnnnnnnnnnnnnnnnnnnnnnnnnnnnnnnnnnnnnnnnnnnnnnnnnnnnnnnnnnnnnnnnnnnnnnnnnnnnnnnnnnnnnnnnnnnnnnnnnnnnnnnnnnnnnnnnnnnnnnnnnnnnnnnnnnnnnnnnnnnnnnnnnnnnnnnnnnnnnnnnnnnnnnnnnnnnnnnnnnnnnnnnnnnnnnnnnnnnnnnnnnnnnnnnnnnnnnnnnnnnnnnnnnnnnnnnnnnnnnnnnnnnnnnnnnnnnnnnnnnnnnnnnnnnnnnnnnnnnnnnnnnnnnnnnnnnnnnnnnnnnnnnnnnnnnnnnnnnnnnnnnnnnnnnnnnnnnnnnnnnnnnnnnnnnnnnnnnnnnnnnnnnnnnnnnnnnnnnnnnnnnnnnnnnnnnnnnnnnnnnnnnnnnnnnnnnnnnnnnnnnnnnnnnnnnnnnnnnnnnnnnnnnnnnnnnnnnnnnnnnnnnnnnnnnnnnnnnnnnnnnnnnnnnnnnnnnnnnnnnnnnnnnnnnnnnnnnnnnnnnnnnnnnnnnnnnnnnnnnnnnnnnnnnnnnnnnnnnnnnnnnnnnnnnnnnnnnnnnnnnnnnnnnnnnnnnnnnnnnnnnnnnnnnnnnnnnnnnnnnnnnnnnnnnnnnnnnnnnnnnnnnnnnnnnnnnnnnnnnnnnnnnnnnnnnnnnnnnnnnnnnnnnnnnnnnnnnnnnnnnnnnnnnnnnnnnnnnnnnnnnnnnnnnnnnnnnnnnnnnnnnnnnnnnnnnnnnnnnnnnnnnnnnnnnnnnnnnnnnnnnnnnnnnnnnnnnnnnnnnnnnnnnnnnnnnnnnnnnnnnnnnnnnnnnnnnnnnnnnnnnnnnnnnnnnnnnnnnnnnnnnnnnnnnnnnnnnnnnnnnnnnnnnnnnnnnnnnnnnnnnnnnnnnnnnnnnnnnnnnnnnnnnnnnnnnnnnnnnnnnnnnnnnnnnnnnnnnnnnnnnnnnnnnnnnnnnnnnnnnnnnnnnnnnnnnnnnnnnnnnnnnnnnnnnnnnnnnnnnnnnnnnnnnnnnnnnnnnnnnnnnnnnnnnnnnnnnnnnnnnnnnnnnnnnnnnnnnnnnnnnnnnnnnnnnnnnnnnnnnnnnnnnnnnnnnnnnnnnnnnnnnnnnnnnnnnnnnnnnnnnnnnnnnnnnnnnnnnnnnnnnnnnnnnnnnnnnnnnnnnnnnnnnnnnnnnnnnnnnnnnnnnnnnnnnnnnnnnnnnnnnnnnnnnnnnnnnnnnnnnnnnnnnnnnnnnnnnnnnnnnnnnnnnnnnnnnnnnnnnnnnnnnnnnnnnnnnnnnnnnnnnnnnnnnnnnnnnnnnnnnnnnnnnnnnnnnnnnnnnnnnnnnnnnnnnnnnnnnnnnnnnnnnnnnnnnnnnnnnnnnnnnnnnnnnnnnnnnnnnnnnnnnnnnnnnnnnnnnnnnnnnnnnnnnnnnnnnnnnnnnnnnnnnnnnnnnnnnnnnnnnnnnnnnnnnnnnnnnnnnnnnnnnnnnnnnnnnnnnnnnnnnnnnnnnnnnnnnnnnnnnnnnnnnnnnnnnnnnnnnnnnnnnnnnnnnnnnnnnnnnnnnnnnnnnnnnnnnnnnnnnnnnnnnnnnnnnnnnnnnnnnnnnnnnnnnnnnnnnnnnnnnnnnnnnnnnnnnnnnnnnnnnnnnnnnnnnnnnnnnnnnnnnnnnnnnnnnnnnnnnnnnnnnnnnnnnnnnnnnnnnnnnnnnnnnnnnnnnnnnnnnnnnnnnnnnnnnnnnnnnnnnnnnnnnnnnnnnnnnnnnnnnnnnnnnnnnnnnnnnnnnnnnnnnnnnnnnnnnnnnnnnnnnnnnnnnnnnnnnnnnnnnnnnnnnnnnnnnnnnnnnnnnnnnnnnnnnnnnnnnnnnnnnnnnnnnnnnnnnnnnnnnnnnnnnnnnnnnnnnnnnnnnnnnnnnnnnnnnnnnnnnnnnnnnnnnnnnnnnnnnnnnnnnnnnnnnnnnnnnnnnnnnnnnnnnnnnnnnnnnnnnnnnnnnnnnnnnnnnnnnnnnnnnnnnnnnnnnnnnnnnnnnnnnnnnnnnnnnnnnnnnnnnnnnnnnnnnnnnnnnnnnnnnnnnnnnnnnnnnnnnnnnnnnnnnnnnnnnnnnnnnnnnnnnnnnnnnnnnnnnnnnnnnnnnnnnnnnnnnnnnnnnnnnnnnnnnnnnnnnnnnnnnnnnnnnnnnnnnnnnnnnnnnnnnnnnnnnnnnnnnnnnnnnnnnnnnnnnnnnnnnnnnnnnnnnnnnnnnnnnnnnnnnnnnnnnnnnnnnnnnnnnnnnnnnnnnnnnnnnnnnnnnnnnnnnnnnnnnnnnnnnnnnnnnnnnnnnnnnnnnnnnnnnnnnnnnnnnnnnnnnnnnnnnnnnnnnnnnnnnnnnnnnnnnnnnnnnnnnnnnnnnnnnnnnnnnnnnnnnnnnnnnnnnnnnnnnnnnnnnnnnnnnnnnnnnnnnnnnnnnnnnnnnnnnnnnnnnnnnnnnnnnnnnnnnnnnnnnnnnnnnnnnnnnnnnnnnnnnnnnnnnnnnnnnnnnnnnnnnnnnnnnnnnnnnnnnnnnnnnnnnnnnnnnnnnnnnnnnnnnnnnnnnnnnnnnnnnnnnnnnnnnnnnnnnnnnnnnnnnnnnnnnnnnnnnnnnnnnnnnnnnnnnnnnnnnnnnnnnnnnnnnnnnnnnnnnnnnnnnnnnnnnnnnnnnnnnnnnnnnnnnnnnnnnnnnnnnnnnnnnnnnnnnnnnnnnnnnnnnnnnnnnnnnnnnnnnnnnnnnnnnnnnnnnnnnnnnnnnnnnnnnnnnnnnnnnnnnnnnnnnnnnnnnnnnnnnnnnnnnnnnnnnnnnnnnnnnnnnnnnnnnnnnnnnnnnnnnnnnnnnnnnnnnnnnnnnnnnnnnnnnnnnnnnnnnnnnnnnnnnnnnnnnnnnnnnnnnnnnnnnnnnnnnnnnnnnnnnnnnnnnnnnnnnnnnnnnnnnnnnnnnnnnnnnnnnnnnnnnnnnnnnnnnnnnnnnnnnnnnnnnnnnnnnnnnnnnnnnnnnnnnnnnnnnnnnnnnnnnnnnnnnnnnnnnnnnnnnnnnnnnnnnnnnnnnnnnnnnnnnnnnnnnnnnnnnnnnnnnnnnnnnnnnnnnnnnnnnnnnnnnnnnnnnnnnnnnnnnnnnnnnnnnnnnnnnnnnnnnnnnnnnnnnnnnnnnnnnnnnnnnnnnnnnnnnnnnnnnnnnnnnnnnnnnnnnnnnnnnnnnnnnnnnnnnnnnnnnnnnnnnnnnnnnnnnnnnnnnnnnnnnnnnnnnnnnnnnnnnnnnnnnnnnnnnnnnnnnnnnnnnnnnnnnnnnnnnnnnnnnnnnnnnnnnnnnnnnnnnnnnnnnnnnnnnnnnnnnnnnnnnnnnnnnnnnnnnnnnnnnnnnnnnnnnnnnnnnnnnnnnnnnnnnnnnnnnnnnnnnnnnnnnnnnnnnnnnnnnnnnnnnnnnnnnnnnnnnnnnnnnnnnnnnnnnnnnnnnnnnnnnnnnnnnnnnnnnnnnnnnnnnnnnnnnnnnnnnnnnnnnnnnnnnnnnnnnnnnnnnnnnnnnnnnnnnnnnnnnnnnnnnnnnnnnnnnnnnnnnnnnnnnnnnnnnnnnnnnnnnnnnnnnnnnnnnnnnnnnnnnnnnnnnnnnnnnnnnnnnnnnnnnnnnnnnnnnnnnnnnnnnnnnnnnnnnnnnnnnnnnnnnnnnnnnnnnnnnnnnnnnnnnnnnnnnnnnnnnnnnnnnnnnnnnnnnnnnnnnnnnnnnnnnnnnnnnnnnnnnnnnnnnnnnnnnnnnnnnnnnnnnnnnnnnnnnnnnnnnnnnnnnnnnnnnnnnnnnnnnnnnnnnnnnnnnnnnnnnnnnnnnnnnnnnnnnnnnnnnnnnnnnnnnnnnnnnnnnnnnnnnnnnnnnnnnnnnnnnnnnnnnnnnnnnnnnnnnnnnnnnnnnnnnnnnnnnnnnnnnnnnnnnnnnnnnnnnnnnnnnnnnnnnnnnnnnnnnnnnnnnnnnnnnnnnnnnnnnnnnnnnnnnnnnnnnnnnnnnnnnnnnnnnnnnnnnnnnnnnnnnnnnnnnnnnnnnnnnnnnnnnnnnnnnnnnnnnnnnnnnnnnnnnnnnnnnnnnnnnnnnnnnnnnnnnnnnnnnnnnnnnnnnnnnnnnnnnnnnnnnnnnnnnnnnnnnnnnnnnnnnnnnnnnnnnnnnnnnnnnnnnnnnnnnnnnnnnnnnnnnnnnnnnnnnnnnnnnnnnnnnnnnnnnnnnnnnnnnnnnnnnnnnnnnnnnnnnnnnnnnnnnnnnnnnnnnnnnnnnnnnnnnnnnnnnnnnnnnnnnnnnnnnnnnnnnnnnnnnnnnnnnnnnnnnnnnnnnnnnnnnnnnnnnnnnnnnnnnnnnnnnnnnnnnnnnnnnnnnnnnnnnnnnnnnnnnnnnnnnnnnnnnnnnnnnnnnnnnnnnnnnnnnnnnnnnnnnnnnnnnnnnnnnnnnnnnnnnnnnnnnnnnnnnnnnnnnnnnnnnnnnnnnnnnnnnnnnnnnnnnnnnnnnnnnnnnnnnnnnnnnnnnnnnnnnnnnnnnnnnnnnnnnnnnnnnnnnnnnnnnnnnnnnnnnnnnnnnnnnnnnnnnnnnnnnnnnnnnnnnnnnnnnnnnnnnnnnnnnnnnnnnnnnnnnnnnnnnnnnnnnnnnnnnnnnnnnnnnnnnnnnnnnnnnnnnnnnnnnnnnnnnnnnnnnnnnnnnnnnnnnnnnnnnnnnnnnnnnnnnnnnnnnnnnnnnnnnnnnnnnnnnnnnnnnnnnnnnnnnnnnnnnnnnnnnnnnnnnnnnnnnnnnnnnnnnnnnnnnnnnnnnnnnnnnnnnnnnnnnnnnnnnnnnnnnnnnnnnnnnnnnnnnnnnnnnnnnnnnnnnnnnnnnnnnnnnnnnnnnnnnnnnnnnnnnnnnnnnnnnnnnnnnnnnnnnnnnnnnnnnnnnnnnnnnnnnnnnnnnnnnnnnnnnnnnnnnnnnnnnnnnnnnnnnnnnnnnnnnnnnnnnnnnnnnnnnnnnnnnnnnnnnnnnnnnnnnnnnnnnnnnnnnnnnnnnnnnnnnnnnnnnnnnnnnnnnnnnnnnnnnnnnnnnnnnnnnnnnnnnnnnnnnnnnnnnnnnnnnnnnnnnnnnnnnnnnnnnnnnnnnnnnnnnnnnnnnnnnnnnnnnnnnnnnnnnnnnnnnnnnnnnnnnnnnnnnnnnnnnnnnnnnnnnnnnnnnnnnnnnnnnnnnnnnnnnnnnnnnnnnnnnnnnnnnnnnnnnnnnnnnnnnnnnnnnnnnnnnnnnnnnnnnnnnnnnnnnnnnnnnnnnnnnnnnnnnnnnnnnnnnnnnnnnnnnnnnnnnnnnnnnnnnnnnnnnnnnnnnnnnnnnnnnnnnnnnnnnnnnnnnnnnnnnnnnnnnnnnnnnnnnnnnnnnnnnnnnnnnnnnnnnnnnnnnnnnnnnnnnnnnnnnnnnnnnnnnnnnnnnnnnnnnnnnnnnnnnnnnnnnnnnnnnnnnnnnnnnnnnnnnnnnnnnnnnnnnnnnnnnnnnnnnnnnnnnnnnnnnnnnnnnnnnnnnnnnnnnnnnnnnnnnnnnnnnnnnnnnnnnnnnnnnnnnnnnnnnnnnnnnnnnnnnnnnnnnnnnnnnnnnnnnnnnnnnnnnnnnnnnnnnnnnnnnnnnnnnnnnnnnnnnnnnnnnnnnnnnnnnnnnnnnnnnnnnnnnnnnnnnnnnnnnnnnnnnnnnnnnnnnnnnnnnnnnnnnnnnnnnnnnnnnnnnnnnnnnnnnnnnnnnnnnnnnnnnnnnnnnnnnnnnnnnnnnnnnnnnnnnnnnnnnnnnnnnnnnnnnnnnnnnnnnnnnnnnnnnnnnnnnnnnnnnnnnnnnnnnnnnnnnnnnnnnnnnnnnnnnnnnnnnnnnnnnnnnnnnnnnnnnnnnnnnnnnnnnnnnnnnnnnnnnnnnnnnnnnnnnnnnnnnnnnnnnnnnnnnnnnnnnnnnnnnnnnnnnnnnnnnnnnnnnnnnnnnnnnnnnnnnnnnnnnnnnnnnnnnnnnnnnnnnnnnnnnnnnnnnnnnnnnnnnnnnnnnnnnnnnnnnnnnnnnnnnnnnnnnnnnnnnnnnnnnnnnnnnnnnnnnnnnnnnnnnnnnnnnnnnnnnnnnnnnnnnnnnnnnnnnnnnnnnnnnnnnnnnnnnnnnnnnnnnnnnnnnnnnnnnnnnnnnnnnnnnnnnnnnnnnnnnnnnnnnnnnnnnnnnnnnnnnnnnnnnnnnnnnnnnnnnnnnnnnnnnnnnnnnnnnnnnnnnnnnnnnnnnnnnnnnnnnnnnnnnnnnnnnnnnnnnnnnnnnnnnnnnnnnnnnnnnnnnnnnnnnnnnnnnnnnnnnnnnnnnnnnnnnnnnnnnnnnnnnnnnnnnnnnnnnnnnnnnnnnnnnnnnnnnnnnnnnnnnnnnnnnnnnnnnnnnnnnnnnnnnnnnnnnnnnnnnnnnnnnnnnnnnnnnnnnnnnnnnnnnnnnnnnnnnnnnnnnnnnnnnnnnnnnnnnnnnnnnnnnnnnnnnnnnnnnnnnnnnnnnnnnnnnnnnnnnnnnnnnnnnnnnnnnnnnnnnnnnnnnnnnnnnnnnnnnnnnnnnnnnnnnnnnnnnnnnnnnnnnnnnnnnnnnnnnnnnnnnnnnnnnnnnnnnnnnnnnnnnnnnnnnnnnnnnnnnnnnnnnnnnnnnnnnnnnnnnnnnnnnnnnnnnnnnnnnnnnnnnnnnnnnnnnnnnnnnnnnnnnnnnnnnnnnnnnnnnnnnnnnnnnnnnnnnnnnnnnnnnnnnnnnnnnnnnnnnnnnnnnnnnnnnnnnnnnnnnnnnnnnnnnnnnnnnnnnnnnnnnnnnnnnnnnnnnnnnnnnnnnnnnnnnnnnnnnnnnnnnnnnnnnnnnnnnnnnnnnnnnnnnnnnnnnnnnnnnnnnnnnnnnnnnnnnnnnnnnnnnnnnnnnnnnnnnnnnnnnnnnnnnnnnnnnnnnnnnnnnnnnnnnnnnnnnnnnnnnnnnnnnnnnnnnnnnnnnnnnnnnnnnnnnnnnnnnnnnnnnnnnnnnnnnnnnnnnnnnnnnnnnnnnnnnnnnnnnnnnnnnnnnnnnnnnnnnnnnnnnnnnnnnnnnnnnnnnnnnnnnnnnnnnnnnnnnnnnnnnnnnnnnnnnnnnnnnnnnnnnnnnnnnnnnnnnnnnnnnnnnnnnnnnnnnnnnnnnnnnnnnnnnnnnnnnnnnnnnnnnnnnnnnnnnnnnnnnnnnnnnnnnnnnnnnnnnnnnnnnnnnnnnnnnnnnnnnnnnnnnnnnnnnnnnnnnnnnnnnnnnnnnnnnnnnnnnnnnnnnnnnnnnnnnnnnnnnnnnnnnnnnnnnnnnnnnnnnnnnnnnnnnnnnnnnnnnnnnnnnnnnnnnnnnnnnnnnnnnnnnnnnnnnnnnnnnnnnnnnnnnnnnnnnnnnnnnnnnnnnnnnnnnnnnnnnnnnnnnnnnnnnnnnnnnnnnnnnnnnnnnnnnnnnnnnnnnnnnnnnnnnnnnnnnnnnnnnnnnnnnnnnnnnnnnnnnnnnnnnnnnnnnnnnnnnnnnnnnnnnnnnnnnnnnnnnnnnnnnnnnnnnnnnnnnnnnnnnnnnnnnnnnnnnnnnnnnnnnnnnnnnnnnnnnnnnnnnnnnnnnnnnnnnnnnnnnnnnnnnnnnnnnnnnnnnnnnnnnnnnnnnnnnnnnnnnnnnnnnnnnnnnnnnnnnnnnnnnnnnnnnnnnnnnnnnnnnnnnnnnnnnnnnnnnnnnnnnnnnnnnnnnnnnnnnnnnnnnnnnnnnnnnnnnnnnnnnnnnnnnnnnnnnnnnnnnnnnnnnnnnnnnnnnnnnnnnnnnnnnnnnnnnnnnnnnnnnnnnnnnnnnnnnnnnnnnnnnnnnnnnnnnnnnnnnnnnnnnnnnnnnnnnnnnnnnnnnnnnnnnnnnnnnnnnnnnnnnnnnnnnnnnnnnnnnnnnnnnnnnnnnnnnnnnnnnnnnnnnnnnnnnnnnnnnnnnnnnnnnnnnnnnnnnnnnnnnnnnnnnnnnnnnnnnnnnnnnnnnnnnnnnnnnnnnnnnnnnnnnnnnnnnnnnnnnnnnnnnnnnnnnnnnnnnnnnnnnnnnnnnnnnnnnnnnnnnnnnnnnnnnnnnnnnnnnnnnnnnnnnnnnnnnnnnnnnnnnnnnnnnnnnnnnnnnnnnnnnnnnnnnnnnnnnnnnnnnnnnnnnnnnnnnnnnnnnnnnnnnnnnnnnnnnnnnnnnnnnnnnnnnnnnnnnnnnnnnnnnnnnnnnnnnnnnnnnnnnnnnnnnnnnnnnnnnnnnnnnnnnnnnnnnnnnnnnnnnnnnnnnnnnnnnnnnnnnnnnnnnnnnnnnnnnnnnnnnnnnnnnnnnnnnnnnnnnnnnnnnnnnnnnnnnnnnnnnnnnnnnnnnnnnnnnnnnnnnnnnnnnnnnnnnnnnnnnnnnnnnnnnnnnnnnnnnnnnnnnnnnnnnnnnnnnnnnnnnnnnnnnnnnnnnnnnnnnnnnnnnnnnnnnnnnnnnnnnnnnnnnnnnnnnnnnnnnnnnnnnnnnnnnnnnnnnnnnnnnnnnnnnnnnnnnnnnnnnnnnnnnnnnnnnnnnnnnnnnnnnnnnnnnnnnnnnnnnnnnnnnnnnnnnnnnnnnnnnnnnnnnnnnnnnnnnnnnnnnnnnnnnnnnnnnnnnnnnnnnnnnnnnnnnnnnnnnnnnnnnnnnnnnnnnnnnnnnnnnnnnnnnnnnnnnnnnnnnnnnnnnnnnnnnnnnnnnnnnnnnnnnnnnnnnnnnnnnnnnnnnnnnnnnnnnnnnnnnnnnnnnnnnnnnnnnnnnnnnnnnnnnnnnnnnnnnnnnnnnnnnnnnnnnnnnnnnnnnnnnnnnnnnnnnnnnnnnnnnnnnnnnnnnnnnnnnnnnnnnnnnnnnnnnnnnnnnnnnnnnnnnnnnnnnnnnnnnnnnnnnnnnnnnnnnnnnnnnnnnnnnnnnnnnnnnnnnnnnnnnnnnnnnnnnnnnnnnnnnnnnnnnnnnnnnnnnnnnnnnnnnnnnnnnnnnnnnnnnnnnnnnnnnnnnnnnnnnnnnnnnnnnnnnnnnnnnnnnnnnnnnnnnnnnnnnnnnnnnnnnnnnnnnnnnnnnnnnnnnnnnnnnnnnnnnnnnnnnnnnnnnnnnnnnnnnnnnnnnnnnnnnnnnnnnnnnnnnnnnnnnnnnnnnnnnnnnnnnnnnnnnnnnnnnnnnnnnnnnnnnnnnnnnnnnnnnnnnnnnnnnnnnnnnnnnnnnnnnnnnnnnnnnnnnnnnnnnnnnnnnnnnnnnnnnnnnnnnnnnnnnnnnnnnnnnnnnnnnnnnnnnnnnnnnnnnnnnnnnnnnnnnnnnnnnnnnnnnnnnnnnnnnnnnnnnnnnnnnnnnnnnnnnnnnnnnnnnnnnnnnnnnnnnnnnnnnnnnnnnnnnnnnnnnnnnnnnnnnnnnnnnnnnnnnnnnnnnnnnnnnnnnnnnnnnnnnnnnnnnnnnnnnnnnnnnnnnnnnnnnnnnnnnnnnnnnnnnnnnnnnnnnnnnnnnnnnnnnnnnnnnnnnnnnnnnnnnnnnnnnnnnnnnnnnnnnnnnnnnnnnnnnnnnnnnnnnnnnnnnnnnnnnnnnnnnnnnnnnnnnnnnnnnnnnnnnnnnnnnnnnnnnnnnnnnnnnnnnnnnnnnnnnnnnnnnnnnnnnnnnnnnnnnnnnnnnnnnnnnnnnnnnnnnnnnnnnnnnnnnnnnnnnnnnnnnnnnnnnnnnnnnnnnnnnnnnnnnnnnnnnnnnnnnnnnnnnnnnnnnnnnnnnnnnnnnnnnnnnnnnnnnnnnnnnnnnnnnnnnnnnnnnnnnnnnnnnnnnnnnnnnnnnnnnnnnnnnnnnnnnnnnnnnnnnnnnnnnnnnnnnnnnnnnnnnnnnnnnnnnnnnnnnnnnnnnnnnnnnnnnnnnnnnnnnnnnnnnnnnnnnnnnnnnnnnnnnnnnnnnnnnnnnnnnnnnnnnnnnnnnnnnnnnnnnnnnnnnnnnnnnnnnnnnnnnnnnnnnnnnnnnnnnnnnnnnnnnnnnnnnnnnnnnnnnnnnnnnnnnnnnnnnnnnnnnnnnnnnnnnnnnnnnnnnnnnnnnnnnnnnnnnnnnnnnnnnnnnnnnnnnnnnnnnnnnnnnnnnnnnnnnnnnnnnnnnnnnnnnnnnnnnnnnnnnnnnnnnnnnnnnnnnnnnnnnnnnnnnnnnnnnnnnnnnnnnnnnnnnnnnnnnnnnnnnnnnnnnnnnnnnnnnnnnnnnnnnnnnnnnnnnnnnnnnnnnnnnnnnnnnnnnnnnnnnnnnnnnnnnnnnnnnnnnnnnnnnnnnnnnnnnnnnnnnnnnnnnnnnnnnnnnnnnnnnnnnnnnnnnnnnnnnnnnnnnnnnnnnnnnnnnnnnnnnnnnnnnnnnnnnnnnnnnnnnnnnnnnnnnnnnnnnnnnnnnnnnnnnnnnnnnnnnnnnnnnnnnnnnnnnnnnnnnnnnnnnnnnnnnnnnnnnnnnnnnnnnnnnnnnnnnnnnnnnnnnnnnnnnnnnnnnnnnnnnnnnnnnnnnnnnnnnnnnnnnnnnnnnnnnnnnnnnnnnnnnnnnnnnnnnnnnnnnnnnnnnnnnnnnnnnnnnnnnnnnnnnnnnnnnnnnnnnnnnnnnnnnnnnnnnnnnnnnnnnnnnnnnnnnnnnnnnnnnnnnnnnnnnnnnnnnnnnnnnnnnnnnnnnnnnnnnnnnnnnnnnnnnnnnnnnnnnnnnnnnnnnnnnnnnnnnnnnnnnnnnnnnnnnnnnnnnnnnnnnnnnnnnnnnnnnnnnnnnnnnnnnnnnnnnnnnnnnnnnnnnnnnnnnnnnnnnnnnnnnnnnnnnnnnnnnnnnnnnnnnnnnnnnnnnnnnnnnnnnnnnnnnnnnnnnnnnnnnnnnnnnnnnnnnnnnnnnnnnnnnnnnnnnnnnnnnnnnnnnnnnnnnnnnnnnnnnnnnnnnnnnnnnnnnnnnnnnnnnnnnnnnnnnnnnnnnnnnnnnnnnnnnnnnnnnnnnnnnnnnnnnnnnnnnnnnnnnnnnnnnnnnnnnnnnnnnnnnnnnnnnnnnnnnnnnnnnnnnnnnnnnnnnnnnnnnnnnnnnnnnnnnnnnnnnnnnnnnnnnnnnnnnnnnnnnnnnnnnnnnnnnnnnnnnnnnnnnnnnnnnnnnnnnnnnnnnnnnnnnnnnnnnnnnnnnnnnnnnnnnnnnnnnnnnnnnnnnnnnnnnnnnnnnnnnnnnnnnnnnnnnnnnnnnnnnnnnnnnnnnnnnnnnnnnnnnnnnnnnnnnnnnnnnnnnnnnnnnnnnnnnnnnnnnnnnnnnnnnnnnnnnnnnnnnnnnnnnnnnnnnnnnnnnnnnnnnnnnnnnnnnnnnnnnnnnnnnnnnnnnnnnnnnnnnnnnnnnnnnnnnnnnnnnnnnnnnnnnnnnnnnnnnnnnnnnnnnnnnnnnnnnnnnnnnnnnnnnnnnnnnnnnnnnnnnnnnnnnnnnnnnnnnnnnnnnnnnnnnnnnnnnnnnnnnnnnnnnnnnnnnnnnnnnnnnnnnnnnnnnnnnnnnnnnnnnnnnnnnnnnnnnnnnnnnnnnnnnnnnnnnnnnnnnnnnnnnnnnnnnnnnnnnnnnnnnnnnnnnnnnnnnnnnnnnnnnnnnnnnnnnnnnnnnnnnnnnnnnnnnnnnnnnnnnnnnnnnnnnnnnnnnnnnnnnnnnnnnnnnnnnnnnnnnnnnnnnnnnnnnnnnnnnnnnnnnnnnnnnnnnnnnnnnnnnnnnnnnnnnnnnnnnnnnnnnnnnnnnnnnnnnnnnnnnnnnnnnnnnnnnnnnnnnnnnnnnnnnnnnnnnnnnnnnnnnnnnnnnnnnnnnnnnnnnnnnnnnnnnnnnnnnnnnnnnnnnnnnnnnnnnnnnnnnnnnnnnnnnnnnnnnnnnnnnnnnnnnnnnnnnnnnnnnnnnnnnnnnnnnnnnnnnnnnnnnnnnnnnnnnnnnnnnnnnnnnnnnnnnnnnnnnnnnnnnnnnnnnnnnnnnnnnnnnnnnnnnnnnnnnnnnnnnnnnnnnnnnnnnnnnnnnnnnnnnnnnnnnnnnnnnnnnnnnnnnnnnnnnnnnnnnnnnnnnnnnnnnnnnnnnnnnnnnnnnnnnnnnnnnnnnnnnnnnnnnnnnnnnnnnnnnnnnnnnnnnnnnnnnnnnnnnnnnnnnnnnnnnnnnnnnnnnnnnnnnnnnnnnnnnnnnnnnnnnnnnnnnnnnnnnnnnnnnnnnnnnnnnnnnnnnnnnnnnnnnnnnnnnnnnnnnnnnnnnnnnnnnnnnnnnnnnnnnnnnnnnnnnnnnnnnnnnnnnnnnnnnnnnnnnnnnnnnnnnnnnnnnnnnnnnnnnnnnnnnnnnnnnnnnnnnnnnnnnnnnnnnnnnnnnnnnnnnnnnnnnnnnnnnnnnnnnnnnnnnnnnnnnnnnnnnnnnnnnnnnnnnnnnnnnnnnnnnnnnnnnnnnnnnnnnnnnnnnnnnnnnnnnnnnnnnnnnnnnnnnnnnnnnnnnnnnnnnnnnnnnnnnnnnnnnnnnnnnnnnnnnnnnnnnnnnnnnnnnnnnnnnnnnnnnnnnnnnnnnnnnnnnnnnnnnnnnnnnnnnnnnnnnnnnnnnnnnnnnnnnnnnnnnnnnnnnnnnnnnnnnnnnnnnnnnnnnnnnnnnnnnnnnnnnnnnnnnnnnnnnnnnnnnnnnnnnnnnnnnnnnnnnnnnnnnnnnnnnnnnnnnnnnnnnnnnnnnnnnnnnnnnnnnnnnnnnnnnnnnnnnnnnnnnnnnnnnnnnnnnnnnnnnnnnnnnnnnnnnnnnnnnnnnnnnnnnnnnnnnnnnnnnnnnnnnnnnnnnnnnnnnnnnnnnnnnnnnnnnnnnnnnnnnnnnnnnnnnnnnnnnnnnnnnnnnnnnnnnnnnnnnnnnnnnnnnnnnnnnnnnnnnnnnnnnnnnnnnnnnnnnnnnnnnnnnnnnnnnnnnnnnnnnnnnnnnnnnnnnnnnnnnnnnnnnnnnnnnnnnnnnnnnnnnnnnnnnnnnnnnnnnnnnnnnnnnnnnnnnnnnnnnnnnnnnnnnnnnnnnnnnnnnnnnnnnnnnnnnnnnnnnnnnnnnnnnnnnnnnnnnnnnnnnnnnnnnnnnnnnnnnnnnnnnnnnnnnnnnnnnnnnnnnnnnnnnnnnnnnnnnnnnnnnnnnnnnnnnnnnnnnnnnnnnnnnnnnnnnnnnnnnnnnnnnnnnnnnnnnnnnnnnnnnnnnnnnnnnnnnnnnnnnnnnnnnnnnnnnnnnnnnnnnnnnnnnnnnnnnnnnnnnnnnnnnnnnnnnnnnnnnnnnnnnnnnnnnnnnnnnnnnnnnnnnnnnnnnnnnnnnnnnnnnnnnnnnnnnnnnnnnnnnnnnnnnnnnnnnnnnnnnnnnnnnnnnnnnnnnnnnnnnnnnnnnnnnnnnnnnnnnnnnnnnnnnnnnnnnnnnnnnnnnnnnnnnnnnnnnnnnnnnnnnnnnnnnnnnnnnnnnnnnnnnnnnnnnnnnnnnnnnnnnnnnnnnnnnnnnnnnnnnnnnnnnnnnnnnnnnnnnnnnnnnnnnnnnnnnnnnnnnnnnnnnnnnnnnnnnnnnnnnnnnnnnnnnnnnnnnnnnnnnnnnnnnnnnnnnnnnnnnnnnnnnnnnnnnnnnnnnnnnnnnnnnnnnnnnnnnnnnnnnnnnnnnnnnnnnnnnnnnnnnnnnnnnnnnnnnnnnnnnnnnnnnnnnnnnnnnnnnnnnnnnnnnnnnnnnnnnnnnnnnnnnnnnnnnnnnnnnnnnnnnnnnnnnnnnnnnnnnnnnnnnnnnnnnnnnnnnnnnnnnnnnnnnnnnnnnnnnnnnnnnnnnnnnnnnnnnnnnnnnnnnnnnnnnnnnnnnnnnnnnnnnnnnnnnnnnnnnnnnnnnnnnnnnnnnnnnnnnnnnnnnnnnnnnnnnnnnnnnnnnnnnnnnnnnnnnnnnnnnnnnnnnnnnnnnnnnnnnnnnnnnnnnnnnnnnnnnnnnnnnnnnnnnnnnnnnnnnnnnnnnnnnnnnnnnnnnnnnnnnnnnnnnnnnnnnnnnnnnnnnnnnnnnnnnnnnnnnnnnnnnnnnnnnnnnnnnnnnnnnnnnnnnnnnnnnnnnnnnnnnnnnnnnnnnnnnnnnnnnnnnnnnnnnnnnnnnnnnnnnnnnnnnnnnnnnnnnnnnnnnnnnnnnnnnnnnnnnnnnnnnnnnnnnnnnnnnnnnnnnnnnnnnnnnnnnnnnnnnnnnnnnnnnnnnnnnnnnnnnnnnnnnnnnnnnnnnnnnnnnnnnnnnnnnnnnnnnnnnnnnnnnnnnnnnnnnnnnnnnnnnnnnnnnnnnnnnnnnnnnnnnnnnnnnnnnnnnnnnnnnnnnnnnnnnnnnnnnnnnnnnnnnnnnnnnnnnnnnnnnnnnnnnnnnnnnnnnnnnnnnnnnnnnnnnnnnnnnnnnnnnnnnnnnnnnnnnnnnnnnnnnnnnnnnnnnnnnnnnnnnnnnnnnnnnnnnnnnnnnnnnnnnnnnnnnnnnnnnnnnnnnnnnnnnnnnnnnnnnnnnnnnnnnnnnnnnnnnnnnnnnnnnnnnnnnnnnnnnnnnnnnnnnnnnnnnnnnnnnnnnnnnnnnnnnnnnnnnnnnnnnnnnnnnnnnnnnnnnnnnnnnnnnnnnnnnnnnnnnnnnnnnnnnnnnnnnnnnnnnnnnnnnnnnnnnnnnnnnnnnnnnnnnnnnnnnnnnnnnnnnnnnnnnnnnnnnnnnnnnnnnnnnnnnnnnnnnnnnnnnnnnnnnnnnnnnnnnnnnnnnnnnnnnnnnnnnnnnnnnnnnnnnnnnnnnnnnnnnnnnnnnnnnnnnnnnnnnnnnnnnnnnnnnnnnnnnnnnnnnnnnnnnnnnnnnnnnnnnnnnnnnnnnnnnnnnnnnnnnnnnnnnnnnnnnnnnnnnnnnnnnnnnnnnnnnnnnnnnnnnnnnnnnnnnnnnnnnnnnnnnnnnnnnnnnnnnnnnnnnnnnnnnnnnnnnnnnnnnnnnnnnnnnnnnnnnnnnnnnnnnnnnnnnnnnnnnnnnnnnnnnnnnnnnnnnnnnnnnnnnnnnnnnnnnnnnnnnnnnnnnnnnnnnnnnnnnnnnnnnnnnnnnnnnnnnnnnnnnnnnnnnnnnnnnnnnnnnnnnnnnnnnnnnnnnnnnnnnnnnnnnnnnnnnnnnnnnnnnnnnnnnnnnnnnnnnnnnnnnnnnnnnnnnnnnnnnnnnnnnnnnnnnnnnnnnnnnnnnnnnnnnnnnnnnnnnnnnnnnnnnnnnnnnnnnnnnnnnnnnnnnnnnnnnnnnnnnnnnnnnnnnnnnnnnnnnnnnnnnnnnnnnnnnnnnnnnnnnnnnnnnnnnnnnnnnnnnnnnnnnnnnnnnnnnnnnnnnnnnnnnnnnnnnnnnnnnnnnnnnnnnnnnnnnnnnnnnnnnnnnnnnnnnnnnnnnnnnnnnnnnnnnnnnnnnnnnnnnnnnnnnnnnnnnnnnnnnnnnnnnnnnnnnnnnnnnnnnnnnnnnnnnnnnnnnnnnnnnnnnnnnnnnnnnnnnnnnnnnnnnnnnnnnnnnnnnnnnnnnnnnnnnnnnnnnnnnnnnnnnnnnnnnnnnnnnnnnnnnnnnnnnnnnnnnnnnnnnnnnnnnnnnnnnnnnnnnnnnnnnnnnnnnnnnnnnnnnnnnnnnnnnnnnnnnnnnnnnnnnnnnnnnnnnnnnnnnnnnnnnnnnnnnnnnnnnnnnnnnnnnnnnnnnnnnnnnnnnnnnnnnnnnnnnnnnnnnnnnnnnnnnnnnnnnnnnnnnnnnnnnnnnnnnnnnnnnnnnnnnnnnnnnnnnnnnnnnnnnnnnnnnnnnnnnnnnnnnnnnnnnnnnnnnnnnnnnnnnnnnnnnnnnnnnnnnnnnnnnnnnnnnnnnnnnnnnnnnnnnnnnnnnnnnnnnnnnnnnnnnnnnnnnnnnnnnnnnnnnnnnnnnnnnnnnnnnnnnnnnnnnnnnnnnnnnnnnnnnnnnnnnnnnnnnnnnnnnnnnnnnnnnnnnnnnnnnnnnnnnnnnnnnnnnnnnnnnnnnnnnnnnnnnnnnnnnnnnnnnnnnnnnnnnnnnnnnnnnnnnnnnnnnnnnnnnnnnnnnnnnnnnnnnnnnnnnnnnnnnnnnnnnnnnnnnnnnnnnnnnnnnnnnnnnnnnnnnnnnnnnnnnnnnnnnnnnnnnnnnnnnnnnnnnnnnnnnnnnnnnnnnnnnnnnnnnnnnnnnnnnnnnnnnnnnnnnnnnnnnnnnnnnnnnnnnnnnnnnnnnnnnnnnnnnnnnnnnnnnnnnnnnnnnnnnnnnnnnnnnnnnnnnnnnnnnnnnnnnnnnnnnnnnnnnnnnnnnnnnnnnnnnnnnnnnnnnnnnnnnnnnnnnnnnnnnnnnnnnnnnnnnnnnnnnnnnnnnnnnnnnnnnnnnnnnnnnnnnnnnnnnnnnnnnnnnnnnnnnnnnnnnnnnnnnnnnnnnnnnnnnnnnnnnnnnnnnnnnnnnnnnnnnnnnnnnnnnnnnnnnnnnnnnnnnnnnnnnnnnnnnnnnnnnnnnnnnnnnnnnnnnnnnnnnnnnnnnnnnnnnnnnnnnnnnnnnnnnnnnnnnnnnnnnnnnnnnnnnnnnnnnnnnnnnnnnnnnnnnnnnnnnnnnnnnnnnnnnnnnnnnnnnnnnnnnnnnnnnnnnnnnnnnnnnnnnnnnnnnnnnnnnnnnnnnnnnnnnnnnnnnnnnnnnnnnnnnnnnnnnnnnnnnnnnnnnnnnnnnnnnnnnnnnnnnnnnnnnnnnnnnnnnnnnnnnnnnnnnnnnnnnnnnnnnnnnnnnnnnnnnnnnnnnnnnnnnnnnnnnnnnnnnnnnnnnnnnnnnnnnnnnnnnnnnnnnnnnnnnnnnnnnnnnnnnnnnnnnnnnnnnnnnnnnnnnnnnnnnnnnnnnnnnnnnnnnnnnnnnnnnnnnnnnnnnnnnnnnnnnnnnnnnnnnnnnnnnnnnnnnnnnnnnnnnnnnnnnnnnnnnnnnnnnnnnnnnnnnnnnnnnnnnnnnnnnnnnnnnnnnnnnnnnnnnnnnnnnnnnnnnnnnnnnnnnnnnnnnnnnnnnnnnnnnnnnnnnnnnnnnnnnnnnnnnnnnnnnnnnnnnnnnnnnnnnnnnnnnnnnnnnnnnnnnnnnnnnnnnnnnnnnnnnnnnnnnnnnnnnnnnnnnnnnnnnnnnnnnnnnnnnnnnnnnnnnnnnnnnnnnnnnnnnnnnnnnnnnnnnnnnnnnnnnnnnnnnnnnnnnnnnnnnnnnnnnnnnnnnnnnnnnnnnnnnnnnnnnnnnnnnnnnnnnnnnnnnnnnnnnnnnnnnnnnnnnnnnnnnnnnnnnnnnnnnnnnnnnnnnnnnnnnnnnnnnnnnnnnnnnnnnnnnnnnnnnnnnnnnnnnnnnnnnnnnnnnnnnnnnnnnnnnnnnnnnnnnnnnnnnnnnnnnnnnnnnnnnnnnnnnnnnnnnnnnnnnnnnnnnnnnnnnnnnnnnnnnnnnnnnnnnnnnnnnnnnnnnnnnnnnnnnnnnnnnnnnnnnnnnnnnnnnnnnnnnnnnnnnnnnnnnnnnnnnnnnnnnnnnnnnnnnnnnnnnnnnnnnnnnnnnnnnnnnnnnnnnnnnnnnnnnnnnnnnnnnnnnnnnnnnnnnnnnnnnnnnnnnnnnnnnnnnnnnnnnnnnnnnnnnnnnnnnnnnnnnnnnnnnnnnnnnnnnnnnnnnnnnnnnnnnnnnnnnnnnnnnnnnnnnnnnnnnnnnnnnnnnnnnnnnnnnnnnnnnnnnnnnnnnnnnnnnnnnnnnnnnnnnnnnnnnnnnnnnnnnnnnnnnnnnnnnnnnnnnnnnnnnnnnnnnnnnnnnnnnnnnnnnnnnnnnnnnnnnnnnnnnnnnnnnnnnnnnnnnnnnnnnnnnnnnnnnnnnnnnnnnnnnnnnnnnnnnnnnnnnnnnnnnnnnnnnnnnnnnnnnnnnnnnnnnnnnnnnnnnnnnnnnnnnnnnnnnnnnnnnnnnnnnnnnnnnnnnnnnnnnnnnnnnnnnnnnnnnnnnnnnnnnnnnnnnnnnnnnnnnnnnnnnnnnnnnnnnnnnnnnnnnnnnnnnnnnnnnnnnnnnnnnnnnnnnnnnnnnnnnnnnnnnnnnnnnnnnnnnnnnnnnnnnnnnnnnnnnnnnnnnnnnnnnnnnnnnnnnnnnnnnnnnnnnnnnnnnnnnnnnnnnnnnnnnnnnnnnnnnnnnnnnnnnnnnnnnnnnnnnnnnnnnnnnnnnnnnnnnnnnnnnnnnnnnnnnnnnnnnnnnnnnnnnnnnnnnnnnnnnnnnnnnnnnnnnnnnnnnnnnnnnnnnnnnnnnnnnnnnnnnnnnnnnnnnnnnnnnnnnnnnnnnnnnnnnnnnnnnnnnnnnnnnnnnnnnnnnnnnnnnnnnnnnnnnnnnnnnnnnnnnnnnnnnnnnnnnnnnnnnnnnnnnnnnnnnnnnnnnnnnnnnnnnnnnnnnnnnnnnnnnnnnnnnnnnnnnnnnnnnnnnnnnnnnnnnnnnnnnnnnnnnnnnnnnnnnnnnnnnnnnnnnnnnnnnnnnnnnnnnnnnnnnnnnnnnnnnnnnnnnnnnnnnnnnnnnnnnnnnnnnnnnnnnnnnnnnnnnnnnnnnnnnnnnnnnnnnnnnnnnnnnnnnnnnnnnnnnnnnnnnnnnnnnnnnnnnnnnnnnnnnnnnnnnnnnnnnnnnnnnnnnnnnnnnnnnnnnnnnnnnnnnnnnnnnnnnnnnnnnnnnnnnnnnnnnnnnnnnnnnnnnnnnnnnnnnnnnnnnnnnnnnnnnnnnnnnnnnnnnnnnnnnnnnnnnnnnnnnnnnnnnnnnnnnnnnnnnnnnnnnnnnnnnnnnnnnnnnnnnnnnnnnnnnnnnnnnnnnnnnnnnnnnnnnnnnnnnnnnnnnnnnnnnnnnnnnnnnnnnnnnnnnnnnnnnnnnnnnnnnnnnnnnnnnnnnnnnnnnnnnnnnnnnnnnnnnnnnnnnnnnnnnnnnnnnnnnnnnnnnnnnnnnnnnnnnnnnnnnnnnnnnnnnnnnnnnnnnnnnnnnnnnnnnnnnnnnnnnnnnnnnnnnnnnnnnnnnnnnnnnnnnnnnnnnnnnnnnnnnnnnnnnnnnnnnnnnnnnnnnnnnnnnnnnnnnnnnnnnnnnnnnnnnnnnnnnnnnnnnnnnnnnnnnnnnnnnnnnnnnnnnnnnnnnnnnnnnnnnnnnnnnnnnnnnnnnnnnnnnnnnnnnnnnnnnnnnnnnnnnnnnnnnnnnnnnnnnnnnnnnnnnnnnnnnnnnnnnnnnnnnnnnnnnnnnnnnnnnnnnnnnnnnnnnnnnnnnnnnnnnnnnnnnnnnnnnnnnnnnnnnnnnnnnnnnnnnnnnnnnnnnnnnnnnnnnnnnnnnnnnnnnnnnnnnnnnnnnnnnnnnnnnnnnnnnnnnnnnnnnnnnnnnnnnnnnnnnnnnnnnnnnnnnnnnnnnnnnnnnnnnnnnnnnnnnnnnnnnnnnnnnnnnnnnnnnnnnnnnnnnnnnnnnnnnnnnnnnnnnnnnnnnnnnnnnnnnnnnnnnnnnnnnnnnnnnnnnnnnnnnnnnnnnnnnnnnnnnnnnnnnnnnnnnnnnnnnnnnnnnnnnnnnnnnnnnnnnnnnnnnnnnnnnnnnnnnnnnnnnnnnnnnnnnnnnnnnnnnnnnnnnnnnnnnnnnnnnnnnnnnnnnnnnnnnnnnnnnnnnnnnnnnnnnnnnnnnnnnnnnnnnnnnnnnnnnnnnnnnnnnnnnnnnnnnnnnnnnnnnnnnnnnnnnnnnnnnnnnnnnnnnnnnnnnnnnnnnnnnnnnnnnnnnnnnnnnnnnnnnnnnnnnnnnnnnnnnnnnnnnnnnnnnnnnnnnnnnnnnnnnnnnnnnnnnnnnnnnnnnnnnnnnnnnnnnnnnnnnnnnnnnnnnnnnnnnnnnnnnnnnnnnnnnnnnnnnnnnnnnnnnnnnnnnnnnnnnnnnnnnnnnnnnnnnnnnnnnnnnnnnnnnnnnnnnnnnnnnnnnnnnnnnnnnnnnnnnnnnnnnnnnnnnnnnnnnnnnnnnnnnnnnnnnnnnnnnnnnnnnnnnnnnnnnnnnnnnnnnnnnnnnnnnnnnnnnnnnnnnnnnnnnnnnnnnnnnnnnnnnnnnnnnnnnnnnnnnnnnnnnnnnnnnnnnnnnnnnnnnnnnnnnnnnnnnnnnnnnnnnnnnnnnnnnnnnnnnnnnnnnnnnnnnnnnnnnnnnnnnnnnnnnnnnnnnnnnnnnnnnnnnnnnnnnnnnnnnnnnnnnnnnnnnnnnnnnnnnnnnnnnnnnnnnnnnnnnnnnnnnnnnnnnnnnnnnnnnnnnnnnnnnnnnnnnnnnnnnnnnnnnnnnnnnnnnnnnnnnnnnnnnnnnnnnnnnnnnnnnnnnnnnnnnnnnnnnnnnnnnnnnnnnnnnnnnnnnnnnnnnnnnnnnnnnnnnnnnnnnnnnnnnnnnnnnnnnnnnnnnnnnnnnnnnnnnnnnnnnnnnnnnnnnnnnnnnnnnnnnnnnnnnnnnnnnnnnnnnnnnnnnnnnnnnnnnnnnnnnnnnnnnnnnnnnnnnnnnnnnnnnnnnnnnnnnnnnnnnnnnnnnnnnnnnnnnnnnnnnnnnnnnnnnnnnnnnnnnnnnnnnnnnnnnnnnnnnnnnnnnnnnnnnnnnnnnnnnnnnnnnnnnnnnnnnnnnnnnnnnnnnnnnnnnnnnnnnnnnnnnnnnnnnnnnnnnnnnnnnnnnnnnnnnnnnnnnnnnnnnnnnnnnnnnnnnnnnnnnnnnnnnnnnnnnnnnnnnnnnnnnnnnnnnnnnnnnnnnnnnnnnnnnnnnnnnnnnnnnnnnnnnnnnnnnnnnnnnnnnnnnnnnnnnnnnnnnnnnnnnnnnnnnnnnnnnnnnnnnnnnnnnnnnnnnnnnnnnnnnnnnnnnnnnnnnnnnnnnnnnnnnnnnnnnnnnnnnnnnnnnnnnnnnnnnnnnnnnnnnnnnnnnnnnnnnnnnnnnnnnnnnnnnnnnnnnnnnnnnnnnnnnnnnnnnnnnnnnnnnnnnnnnnnnnnnnnnnnnnnnnnnnnnnnnnnnnnnnnnnnnnnnnnnnnnnnnnnnnnnnnnnnnnnnnnnnnnnnnnnnnnnnnnnnnnnnnnnnnnnnnnnnnnnnnnnnnnnnnnnnnnnnnnnnnnnnnnnnnnnnnnnnnnnnnnnnnnnnnnnnnnnnnnnnnnnnnnnnnnnnnnnnnnnnnnnnnnnnnnnnnnnnnnnnnnnnnnnnnnnnnnnnnnnnnnnnnnnnnnnnnnnnnnnnnnnnnnnnnnnnnnnnnnnnnnnnnnnnnnnnnnnnnnnnnnnnnnnnnnnnnnnnnnnnnnnnnnnnnnnnnnnnnnnnnnnnnnnnnnnnnnnnnnnnnnnnnnnnnnnnnnnnnnnnnnnnnnnnnnnnnnnnnnnnnnnnnnnnnnnnnnnnnnnnnnnnnnnnnnnnnnnnnnnnnnnnnnnnnnnnnnnnnnnnnnnnnnnnnnnnnnnnnnnnnnnnnnnnnnnnnnnnnnnnnnnnnnnnnnnnnnnnnnnnnnnnnnnnnnnnnnnnnnnnnnnnnnnnnnnnnnnnnnnnnnnnnnnnnnnnnnnnnnnnnnnnnnnnnnnnnnnnnnnnnnnnnnnnnnnnnnnnnnnnnnnnnnnnnnnnnnnnnnnnnnnnnnnnnnnnnnnnnnnnnnnnnnnnnnnnnnnnnnnnnnnnnnnnnnnnnnnnnnnnnnnnnnnnnnnnnnnnnnnnnnnnnnnnnnnnnnnnnnnnnnnnnnnnnnnnnnnnnnnnnnnnnnnnnnnnnnnnnnnnnnnnnnnnnnnnnnnnnnnnnnnnnnnnnnnnnnnnnnnnnnnnnnnnnnnnnnnnnnnnnnnnnnnnnnnnnnnnnnnnnnnnnnnnnnnnnnnnnnnnnnnnnnnnnnnnnnnnnnnnnnnnnnnnnnnnnnnnnnnnnnnnnnnnnnnnnnnnnnnnnnnnnnnnnnnnnnnnnnnnnnnnnnnnnnnnnnnnnnnnnnnnnnnnnnnnnnnnnnnnnnnnnnnnnnnnnnnnnnnnnnnnnnnnnnnnnnnnnnnnnnnnnnnnnnnnnnnnnnnnnnnnnnnnnnnnnnnnnnnnnnnnnnnnnnnnnnnnnnnnnnnnnnnnnnnnnnnnnnnnnnnnnnnnnnnnnnnnnnnnnnnnnnnnnnnnnnnnnnnnnnnnnnnnnnnnnnnnnnnnnnnnnnnnnnnnnnnnnnnnnnnnnnnnnnnnnnnnnnnnnnnnnnnnnnnnnnnnnnnnnnnnnnnnnnnnnnnnnnnnnnnnnnnnnnnnnnnnnnnnnnnnnnnnnnnnnnnnnnnnnnnnnnnnnnnnnnnnnnnnnnnnnnnnnnnnnnnnnnnnnnnnnnnnnnnnnnnnnnnnnnnnnnnnnnnnnnnnnnnnnnnnnnnnnnnnnnnnnnnnnnnnnnnnnnnnnnnnnnnnnnnnnnnnnnnnnnnnnnnnnnnnnnnnnnnnnnnnnnnnnnnnnnnnnnnnnnnnnnnnnnnnnnnnnnnnnnnnnnnnnnnnnnnnnnnnnnnnnnnnnnnnnnnnnnnnnnnnnnnnnnnnnnnnnnnnnnnnnnnnnnnnnnnnnnnnnnnnnnnnnnnnnnnnnnnnnnnnnnnnnnnnnnnnnnnnnnnnnnnnnnnnnnnnnnnnnnnnnnnnnnnnnnnnnnnnnnnnnnnnnnnnnnnnnnnnnnnnnnnnnnnnnnnnnnnnnnnnnnnnnnnnnnnnnnnnnnnnnnnnnnnnnnnnnnnnnnnnnnnnnnnnnnnnnnnnnnnnnnnnnnnnnnnnnnnnnnnnnnnnnnnnnnnnnnnnnnnnnnnnnnnnnnnnnnnnnnnnnnnnnnnnnnnnnnnnnnnnnnnnnnnnnnnnnnnnnnnnnnnnnnnnnnnnnnnnnnnnnnnnnnnnnnnnnnnnnnnnnnnnnnnnnnnnnnnnnnnnnnnnnnnnnnnnnnnnnnnnnnnnnnnnnnnnnnnnnnnnnnnnnnnnnnnnnnnnnnnnnnnnnnnnnnnnnnnnnnnnnnnnnnnnnnnnnnnnnnnnnnnnnnnnnnnnnnnnnnnnnnnnnnnnnnnnnnnnnnnnnnnnnnnnnnnnnnnnnnnnnnnnnnnnnnnnnnnnnnnnnnnnnnnnnnnnnnnnnnnnnnnnnnnnnnnnnnnnnnnnnnnnnnnnnnnnnnnnnnnnnnnnnnnnnnnnnnnnnnnnnnnnnnnnnnnnnnnnnnnnnnnnnnnnnnnnnnnnnnnnnnnnnnnnnnnnnnnnnnnnnnnnnnnnnnnnnnnnnnnnnnnnnnnnnnnnnnnnnnnnnnnnnnnnnnnnnnnnnnnnnnnnnnnnnnnnnnnnnnnnnnnnnnnnnnnnnnnnnnnnnnnnnnnnnnnnnnnnnnnnnnnnnnnnnnnnnnnnnnnnnnnnnnnnnnnnnnnnnnnnnnnnnnnnnnnnnnnnnnnnnnnnnnnnnnnnnnnnnnnnnnnnnnnnnnnnnnnnnnnnnnnnnnnnnnnnnnnnnnnnnnnnnnnnnnnnnnnnnnnnnnnnnnnnnnnnnnnnnnnnnnnnnnnnnnnnnnnnnnnnnnnnnnnnnnnnnnnnnnnnnnnnnnnnnnnnnnnnnnnnnnnnnnnnnnnnnnnnnnnnnnnnnnnnnnnnnnnnnnnnnnnnnnnnnnnnnnnnnnnnnnnnnnnnnnnnnnnnnnnnnnnnnnnnnnnnnnnnnnnnnnnnnnnnnnnnnnnnnnnnnnnnnnnnnnnnnnnnnnnnnnnnnnnnnnnnnnnnnnnnnnnnnnnnnnnnnnnnnnnnnnnnnnnnnnnnnnnnnnnnnnnnnnnnnnnnnnnnnnnnnnnnnnnnnnnnnnnnnnnnnnnnnnnnnnnnnnnnnnnnnnnnnnnnnnnnnnnnnnnnnnnnnnnnnnnnnnnnnnnnnnnnnnnnnnnnnnnnnnnnnnnnnnnnnnnnnnnnnnnnnnnnnnnnnnnnnnnnnnnnnnnnnnnnnnnnnnnnnnnnnnnnnnnnnnnnnnnnnnnnnnnnnnnnnnnnnnnnnnnnnnnnnnnnnnnnnnnnnnnnnnnnnnnnnnnnnnnnnnnnnnnnnnnnnnnnnnnnnnnnnnnnnnnnnnnnnnnnnnnnnnnnnnnnnnnnnnnnnnnnnnnnnnnnnnnnnnnnnnnnnnnnnnnnnnnnnnnnnnnnnnnnnnnnnnnnnnnnnnnnnnnnnnnnnnnnnnnnnnnnnnnnnnnnnnnnnnnnnnnnnnnnnnnnnnnnnnnnnnnnnnnnnnnnnnnnnnnnnnnnnnnnnnnnnnnnnnnnnnnnnnnnnnnnnnnnnnnnnnnnnnnnnnnnnnnnnnnnnnnnnnnnnnnnnnnnnnnnnnnnnnnnnnnnnnnnnnnnnnnnnnnnnnnnnnnnnnnnnnnnnnnnnnnnnnnnnnnnnnnnnnnnnnnnnnnnnnnnnnnnnnnnnnnnnnnnnnnnnnnnnnnnnnnnnnnnnnnnnnnnnnnnnnnnnnnnnnnnnnnnnnnnnnnnnnnnnnnnnnnnnnnnnnnnnnnnnnnnnnnnnnnnnnnnnnnnnnnnnnnnnnnnnnnnnnnnnnnnnnnnnnnnnnnnnnnnnnnnnnnnnnnnnnnnnnnnnnnnnnnnnnnnnnnnnnnnnnnnnnnnnnnnnnnnnnnnnnnnnnnnnnnnnnnnnnnnnnnnnnnnnnnnnnnnnnnnnnnnnnnnnnnnnnnnnnnnnnnnnnnnnnnnnnnnnnnnnnnnnnnnnnnnnnnnnnnnnnnnnnnnnnnnnnnnnnnnnnnnnnnnnnnnnnnnnnnnnnnnnnnnnnnnnnnnnnnnnnnnnnnnnnnnnnnnnnnnnnnnnnnnnnnnnnnnnnnnnnnnnnnnnnnnnnnnnnnnnnnnnnnnnnnnnnnnnnnnnnnnnnnnnnnnnnnnnnnnnnnnnnnnnnnnnnnnnnnnnnnnnnnnnnnnnnnnnnnnnnnnnnnnnnnnnnnnnnnnnnnnnnnnnnnnnnnnnnnnnnnnnnnnnnnnnnnnnnnnnnnnnnnnnnnnnnnnnnnnnnnnnnnnnnnnnnnnnnnnnnnnnnnnnnnnnnnnnnnnnnnnnnnnnnnnnnnnnnnnnnnnnnnnnnnnnnnnnnnnnnnnnnnnnnnnnnnnnnnnnnnnnnnnnnnnnnnnnnnnnnnnnnnnnnnnnnnnnnnnnnnnnnnnnnnnnnnnnnnnnnnnnnnnnnnnnnnnnnnnnnnnnnnnnnnnnnnnnnnnnnnnnnnnnnnnnnnnnnnnnnnnnnnnnnnnnnnnnnnnnnnnnnnnnnnnnnnnnnnnnnnnnnnnnnnnnnnnnnnnnnnnnnnnnnnnnnnnnnnnnnnnnnnnnnnnnnnnnnnnnnnnnnnnnnnnnnnnnnnnnnnnnnnnnnnnnnnnnnnnnnnnnnnnnnnnnnnnnnnnnnnnnnnnnnnnnnnnnnnnnnnnnnnnnnnnnnnnnnnnnnnnnnnnnnnnnnnnnnnnnnnnnnnnnnnnnnnnnnnnnnnnnnnnnnnnnnnnnnnnnnnnnnnnnnnnnnnnnnnnnnnnnnnnnnnnnnnnnnnnnnnnnnnnnnnnnnnnnnnnnnnnnnnnnnnnnnnnnnnnnnnnnnnnnnnnnnnnnnnnnnnnnnnnnnnnnnnnnnnnnnnnnnnnnnnnnnnnnnnnnnnnnnnnnnnnnnnnnnnnnnnnnnnnnnnnnnnnnnnnnnnnnnnnnnnnnnnnnnnnnnnnnnnnnnnnnnnnnnnnnnnnnnnnnnnnnnnnnnnnnnnnnnnnnnnnnnnnnnnnnnnnnnnnnnnnnnnnnnnnnnnnnnnnnnnnnnnnnnnnnnnnnnnnnnnnnnnnnnnnnnnnnnnnnnnnnnnnnnnnnnnnnnnnnnnnnnnnnnnnnnnnnnnnnnnnnnnnnnnnnnnnnnnnnnnnnnnnnnnnnnnnnnnnnnnnnnnnnnnnnnnnnnnnnnnnnnnnnnnnnnnnnnnnnnnnnnnnnnnnnnnnnnnnnnnnnnnnnnnnnnnnnnnnnnnnnnnnnnnnnnnnnnnnnnnnnnnnnnnnnnnnnnnnnnnnnnnnnnnnnnnnnnnnnnnnnnnnnnnnnnnnnnnnnnnnnnnnnnnnnnnnnnnnnnnnnnnnnnnnnnnnnnnnnnnnnnnnnnnnnnnnnnnnnnnnnnnnnnnnnnnnnnnnnnnnnnnnnnnnnnnnnnnnnnnnnnnnnnnnnnnnnnnnnnnnnnnnnnnnnnnnnnnnnnnnnnnnnnnnnnnnnnnnnnnnnnnnnnnnnnnnnnnnnnnnnnnnnnnnnnnnnnnnnnnnnnnnnnnnnnnnnnnnnnnnnnnnnnnnnnnnnnnnnnnnnnnnnnnnnnnnnnnnnnnnnnnnnnnnnnnnnnnnnnnnnnnnnnnnnnnnnnnnnnnnnnnnnnnnnnnnnnnnnnnnnnnnnnnnnnnnnnnnnnnnnnnnnnnnnnnnnnnnnnnnnnnnnnnnnnnnnnnnnnnnnnnnnnnnnnnnnnnnnnnnnnnnnnnnnnnnnnnnnnnnnnnnnnnnnnnnnnnnnnnnnnnnnnnnnnnnnnnnnnnnnnnnnnnnnnnnnnnnnnnnnnnnnnnnnnnnnnnnnnnnnnnnnnnnnnnnnnnnnnnnnnnnnnnnnnnnnnnnnnnnnnnnnnnnnnnnnnnnnnnnnnnnnnnnnnnnnnnnnnnnnnnnnnnnnnnnnnnnnnnnnnnnnnnnnnnnnnnnnnnnnnnnnnnnnnnnnnnnnnnnnnnnnnnnnnnnnnnnnnnnnnnnnnnnnnnnnnnnnnnnnnnnnnnnnnnnnnnnnnnnnnnnnnnnnnnnnnnnnnnnnnnnnnnnnnnnnnnnnnnnnnnnnnnnnnnnnnnnnnnnnnnnnnnnnnnnnnnnnnnnnnnnnnnnnnnnnnnnnnnnnnnnnnnnnnnnnnnnnnnnnnnnnnnnnnnnnnnnnnnnnnnnnnnnnnnnnnnnnnnnnnnnnnnnnnnnnnnnnnnnnnnnnnnnnnnnnnnnnnnnnnnnnnnnnnnnnnnnnnnnnnnnnnnnnnnnnnnnnnnnnnnnnnnnnnnnnnnnnnnnnnnnnnnnnnnnnnnnnnnnnnnnnnnnnnnnnnnnnnnnnnnnnnnnnnnnnnnnnnnnnnnnnnnnnnnnnnnnnnnnnnnnnnnnnnnnnnnnnnnnnnnnnnnnnnnnnnnnnnnnnnnnnnnnnnnnnnnnnnnnnnnnnnnnnnnnnnnnnnnnnnnnnnnnnnnnnnnnnnnnnnnnnnnnnnnnnnnnnnnnnnnnnnnnnnnnnnnnnnnnnnnnnnnnnnnnnnnnnnnnnnnnnnnnnnnnnnnnnnnnnnnnnnnnnnnnnnnnnnnnnnnnnnnnnnnnnnnnnnnnnnnnnnnnnnnnnnnnnnnnnnnnnnnnnnnnnnnnnnnnnnnnnnnnnnnnnnnnnnnnnnnnnnnnnnnnnnnnnnnnnnnnnnnnnnnnnnnnnnnnnnnnnnnnnnnnnnnnnnnnnnnnnnnnnnnnnnnnnnnnnnnnnnnnnnnnnnnnnnnnnnnnnnnnnnnnnnnnnnnnnnnnnnnnnnnnnnnnnnnnnnnnnnnnnnnnnnnnnnnnnnnnnnnnnnnnnnnnnnnnnnnnnnnnnnnnnnnnnnnnnnnnnnnnnnnnnnnnnnnnnnnnnnnnnnnnnnnnnnnnnnnnnnnnnnnnnnnnnnnnnnnnnnnnnnnnnnnnnnnnnnnnnnnnnnnnnnnnnnnnnnnnnnnnnnnnnnnnnnnnnnnnnnnnnnnnnnnnnnnnnnnnnnnnnnnnnnnnnnnnnnnnnnnnnnnnnnnnnnnnnnnnnnnnnnnnnnnnnnnnnnnnnnnnnnnnnnnnnnnnnnnnnnnnnnnnnnnnnnnnnnnnnnnnnnnnnnnnnnnnnnnnnnnnnnnnnnnnnnnnnnnnnnnnnnnnnnnnnnnnnnnnnnnnnnnnnnnnnnnnnnnnnnnnnnnnnnnnnnnnnnnnnnnnnnnnnnnnnnnnnnnnnnnnnnnnnnnnnnnnnnnnnnnnnnnnnnnnnnnnnnnnnnnnnnnnnnnnnnnnnnnnnnnnnnnnnnnnnnnnnnnnnnnnnnnnnnnnnnnnnnnnnnnnnnnnnnnnnnnnnnnnnnnnnnnnnnnnnnnnnnnnnnnnnnnnnnnnnnnnnnnnnnnnnnnnnnnnnnnnnnnnnnnnnnnnnnnnnnnnnnnnnnnnnnnnnnnnnnnnnnnnnnnnnnnnnnnnnnnnnnnnnnnnnnnnnnnnnnnnnnnnnnnnnnnnnnnnnnnnnnnnnnnnnnnnnnnnnnnnnnnnnnnnnnnnnnnnnnnnnnnnnnnnnnnnnnnnnnnnnnnnnnnnnnnnnnnnnnnnnnnnnnnnnnnnnnnnnnnnnnnnnnnnnnnnnnnnnnnnnnnnnnnnnnnnnnnnnnnnnnnnnnnnnnnnnnnnnnnnnnnnnnnnnnnnnnnnnnnnnnnnnnnnnnnnnnnnnnnnnnnnnnnnnnnnnnnnnnnnnnnnnnnnnnnnnnnnnnnnnnnnnnnnnnnnnnnnnnnnnnnnnnnnnnnnnnnnnnnnnnnnnnnnnnnnnnnnnnnnnnnnnnnnnnnnnnnnnnnnnnnnnnnnnnnnnnnnnnnnnnnnnnnnnnnnnnnnnnnnnnnnnnnnnnnnnnnnnnnnnnnnnnnnnnnnnnnnnnnnnnnnnnnnnnnnnnnnnnnnnnnnnnnnnnnnnnnnnnnnnnnnnnnnnnnnnnnnnnnnnnnnnnnnnnnnnnnnnnnnnnnnnnnnnnnnnnnnnnnnnnnnnnnnnnnnnnnnnnnnnnnnnnnnnnnnnnnnnnnnnnnnnnnnnnnnnnnnnnnnnnnnnnnnnnnnnnnnnnnnnnnnnnnnnnnnnnnnnnnnnnnnnnnnnnnnnnnnnnnnnnnnnnnnnnnnnnnnnnnnnnnnnnnnnnnnnnnnnnnnnnnnnnnnnnnnnnnnnnnnnnnnnnnnnnnnnnnnnnnnnnnnnnnnnnnnnnnnnnnnnnnnnnnnnnnnnnnnnnnnnnnnnnnnnnnnnnnnnnnnnnnnnnnnnnnnnnnnnnnnnnnnnnnnnnnnnnnnnnnnnnnnnnnnnnnnnnnnnnnnnnnnnnnnnnnnnnnnnnnnnnnnnnnnnnnnnnnnnnnnnnnnnnnnnnnnnnnnnnnnnnnnnnnnnnnnnnnnnnnnnnnnnnnnnnnnnnnnnnnnnnnnnnnnnnnnnnnnnnnnnnnnnnnnnnnnnnnnnnnnnnnnnnnnnnnnnnnnnnnnnnnnnnnnnnnnnnnnnnnnnnnnnnnnnnnnnnnnnnnnnnnnnnnnnnnnnnnnnnnnnnnnnnnnnnnnnnnnnnnnnnnnnnnnnnnnnnnnnnnnnnnnnnnnnnnnnnnnnnnnnnnnnnnnnnnnnnnnnnnnnnnnnnnnnnnnnnnnnnnnnnnnnnnnnnnnnnnnnnnnnnnnnnnnnnnnnnnnnnnnnnnnnnnnnnnnnnnnnnnnnnnnnnnnnnnnnnnnnnnnnnnnnnnnnnnnnnnnnnnnnnnnnnnnnnnnnnnnnnnnnnnnnnnnnnnnnnnnnnnnnnnnnnnnnnnnnnnnnnnnnnnnnnnnnnnnnnnnnnnnnnnnnnnnnnnnnnnnnnnnnnnnnnnnnnnnnnnnnnnnnnnnnnnnnnnnnnnnnnnnnnnnnnnnnnnnnnnnnnnnnnnnnnnnnnnnnnnnnnnnnnnnnnnnnnnnnnnnnnnnnnnnnnnnnnnnnnnnnnnnnnnnnnnnnnnnnnnnnnnnnnnnnnnnnnnnnnnnnnnnnnnnnnnnnnnnnnnnnnnnnnnnnnnnnnnnnnnnnnnnnnnnnnnnnnnnnnnnnnnnnnnnnnnnnnnnnnnnnnnnnnnnnnnnnnnnnnnnnnnnnnnnnnnnnnnnnnnnnnnnnnnnnnnnnnnnnnnnnnnnnnnnnnnnnnnnnnnnnnnnnnnnnnnnnnnnnnnnnnnnnnnnnnnnnnnnnnnnnnnnnnnnnnnnnnnnnnnnnnnnnnnnnnnnnnnnnnnnnnnnnnnnnnnnnnnnnnnnnnnnnnnnnnnnnnnnnnnnnnnnnnnnnnnnnnnnnnnnnnnnnnnnnnnnnnnnnnnnnnnnnnnnnnnnnnnnnnnnnnnnnnnnnnnnnnnnnnnnnnnnnnnnnnnnnnnnnnnnnnnnnnnnnnnnnnnnnnnnnnnnnnnnnnnnnnnnnnnnnnnnnnnnnnnnnnnnnnnnnnnnnnnnnnnnnnnnnnnnnnnnnnnnnnnnnnnnnnnnnnnnnnnnnnnnnnnnnnnnnnnnnnnnnnnnnnnnnnnnnnnnnnnnnnnnnnnnnnnnnnnnnnnnnnnnnnnnnnnnnnnnnnnnnnnnnnnnnnnnnnnnnnnnnnnnnnnnnnnnnnnnnnnnnnnnnnnnnnnnnnnnnnnnnnnnnnnnnnnnnnnnnnnnnnnnnnnnnnnnnnnnnnnnnnnnnnnnnnnnnnnnnnnnnnnnnnnnnnnnnnnnnnnnnnnnnnnnnnnnnnnnnnnnnnnnnnnnnnnnnnnnnnnnnnnnnnnnnnnnnnnnnnnnnnnnnnnnnnnnnnnnnnnnnnnnnnnnnnnnnnnnnnnnnnnnnnnnnnnnnnnnnnnnnnnnnnnnnnnnnnnnnnnnnnnnnnnnnnnnnnnnnnnnnnnnnnnnnnnnnnnnnnnnnnnnnnnnnnnnnnnnnnnnnnnnnnnnnnnnnnnnnnnnnnnnnnnnnnnnnnnnnnnnnnnnnnnnnnnnnnnnnnnnnnnnnnnnnnnnnnnnnnnnnnnnnnnnnnnnnnnnnnnnnnnnnnnnnnnnnnnnnnnnnnnnnnnnnnnnnnnnnnnnnnnnnnnnnnnnnnnnnnnnnnnnnnnnnnnnnnnnnnnnnnnnnnnnnnnnnnnnnnnnnnnnnnnnnnnnnnnnnnnnnnnnnnnnnnnnnnnnnnnnnnnnnnnnnnnnnnnnnnnnnnnnnnnnnnnnnnnnnnnnnnnnnnnnnnnnnnnnnnnnnnnnnnnnnnnnnnnnnnnnnnnnnnnnnnnnnnnnnnnnnnnnnnnnnnnnnnnnnnnnnnnnnnnnnnnnnnnnnnnnnnnnnnnnnnnnnnnnnnnnnnnnnnnnnnnnnnnnnnnnnnnnnnnnnnnnnnnnnnnnnnnnnnnnnnnnnnnnnnnnnnnnnnnnnnnnnnnnnnnnnnnnnnnnnnnnnnnnnnnnnnnnnnnnnnnnnnnnnnnnnnnnnnnnnnnnnnnnnnnnnnnnnnnnnnnnnnnnnnnnnnnnnnnnnnnnnnnnnnnnnnnnnnnnnnnnnnnnnnnnnnnnnnnnnnnnnnnnnnnnnnnnnnnnnnnnnnnnnnnnnnnnnnnnnnnnnnnnnnnnnnnnnnnnnnnnnnnnnnnnnnnnnnnnnnnnnnnnnnnnnnnnnnnnnnnnnnnnnnnnnnnnnnnnnnnnnnnnnnnnnnnnnnnnnnnnnnnnnnnnnnnnnnnnnnnnnnnnnnnnnnnnnnnnnnnnnnnnnnnnnnnnnnnnnnnnnnnnnnnnnnnnnnnnnnnnnnnnnnnnnnnnnnnnnnnnnnnnnnnnnnnnnnnnnnnnnnnnnnnnnnnnnnnnnnnnnnnnnnnnnnnnnnnnnnnnnnnnnnnnnnnnnnnnnnnnnnnnnnnnnnnnnnnnnnnnnnnnnnnnnnnnnnnnnnnnnnnnnnnnnnnnnnnnnnnnnnnnnnnnnnnnnnnnnnnnnnnnnnnnnnnnnnnnnnnnnnnnnnnnnnnnnnnnnnnnnnnnnnnnnnnnnnnnnnnnnnnnnnnnnnnnnnnnnnnnnnnnnnnnnnnnnnnnnnnnnnnnnnnnnnnnnnnnnnnnnnnnnnnnnnnnnnnnnnnnnnnnnnnnnnnnnnnnnnnnnnnnnnnnnnnnnnnnnnnnnnnnnnnnnnnnnnnnnnnnnnnnnnnnnnnnnnnnnnnnnnnnnnnnnnnnnnnnnnnnnnnnnnnnnnnnnnnnnnnnnnnnnnnnnnnnnnnnnnnnnnnnnnnnnnnnnnnnnnnnnnnnnnnnnnnnnnnnnnnnnnnnnnnnnnnnnnnnnnnnnnnnnnnnnnnnnnnnnnnnnnnnnnnnnnnnnnnnnnnnnnnnnnnnnnnnnnnnnnnnnnnnnnnnnnnnnnnnnnnnnnnnnnnnnnnnnnnnnnnnnnnnnnnnnnnnnnnnnnnnnnnnnnnnnnnnnnnnnnnnnnnnnnnnnnnnnnnnnnnnnnnnnnnnnnnnnnnnnnnnnnnnnnnnnnnnnnnnnnnnnnnnnnnnnnnnnnnnnnnnnnnnnnnnnnnnnnnnnnnnnnnnnnnnnnnnnnnnnnnnnnnnnnnnnnnnnnnnnnnnnnnnnnnnnnnnnnnnnnnnnnnnnnnnnnnnnnnnnnnnnnnnnnnnnnnnnnnnnnnnnnnnnnnnnnnnnnnnnnnnnnnnnnnnnnnnnnnnnnnnnnnnnnnnnnnnnnnnnnnnnnnnnnnnnnnnnnnnnnnnnnnnnnnnnnnnnnnnnnnnnnnnnnnnnnnnnnnnnnnnnnnnnnnnnnnnnnnnnnnnnnnnnnnnnnnnnnnnnnnnnnnnnnnnnnnnnnnnnnnnnnnnnnnnnnnnnnnnnnnnnnnnnnnnnnnnnnnnnnnnnnnnnnnnnnnnnnnnnnnnnnnnnnnnnnnnnnnnnnnnnnnnnnnnnnnnnnnnnnnnnnnnnnnnnnnnnnnnnnnnnnnnnnnnnnnnnnnnnnnnnnnnnnnnnnnnnnnnnnnnnnnnnnnnnnnnnnnnnnnnnnnnnnnnnnnnnnnnnnnnnnnnnnnnnnnnnnnnnnnnnnnnnnnnnnnnnnnnnnnnnnnnnnnnnnnnnnnnnnnnnnnnnnnnnnnnnnnnnnnnnnnnnnnnnnnnnnnnnnnnnnnnnnnnnnnnnnnnnnnnnnnnnnnnnnnnnnnnnnnnnnnnnnnnnnnnnnnnnnnnnnnnnnnnnnnnnnnnnnnnnnnnnnnnnnnnnnnnnnnnnnnnnnnnnnnnnnnnnnnnnnnnnnnnnnnnnnnnnnnnnnnnnnnnnnnnnnnnnnnnnnnnnnnnnnnnnnnnnnnnnnnnnnnnnnnnnnnnnnnnnnnnnnnnnnnnnnnnnnnnnnnnnnnnnnnnnnnnnnnnnnnnnnnnnnnnnnnnnnnnnnnnnnnnnnnnnnnnnnnnnnnnnnnnnnnnnnnnnnnnnnnnnnnnnnnnnnnnnnnnnnnnnnnnnnnnnnnnnnnnnnnnnnnnnnnnnnnnnnnnnnnnnnnnnnnnnnnnnnnnnnnnnnnnnnnnnnnnnnnnnnnnnnnnnnnnnnnnnnnnnnnnnnnnnnnnnnnnnnnnnnnnnnnnnnnnnnnnnnnnnnnnnnnnnnnnnnnnnnnnnnnnnnnnnnnnnnnnnnnnnnnnnnnnnnnnnnnnnnnnnnnnnnnnnnnnnnnnnnnnnnnnnnnnnnnnnnnnnnnnnnnnnnnnnnnnnnnnnnnnnnnnnnnnnnnnnnnnnnnnnnnnnnnnnnnnnnnnnnnnnnnnnnnnnnnnnnnnnnnnnnnnnnnnnnnnnnnnnnnnnnnnnnnnnnnnnnnnnnnnnnnnnnnnnnnnnnnnnnnnnnnnnnnnnnnnnnnnnnnnnnnnnnnnnnnnnnnnnnnnnnnnnnnnnnnnnnnnnnnnnnnnnnnnnnnnnnnnnnnnnnnnnnnnnnnnnnnnnnnnnnnnnnnnnnnnnnnnnnnnnnnnnnnnnnnnnnnnnnnnnnnnnnnnnnnnnnnnnnnnnnnnnnnnnnnnnnnnnnnnnnnnnnnnnnnnnnnnnnnnnnnnnnnnnnnnnnnnnnnnnnnnnnnnnnnnnnnnnnnnnnnnnnnnnnnnnnnnnnnnnnnnnnnnnnnnnnnnnnnnnnnnnnnnnnnnnnnnnnnnnnnnnnnnnnnnnnnnnnnnnnnnnnnnnnnnnnnnnnnnnnnnnnnnnnnnnnnnnnnnnnnnnnnnnnnnnnnnnnnnnnnnnnnnnnnnnnnnnnnnnnnnnnnnnnnnnnnnnnnnnnnnnnnnnnnnnnnnnnnnnnnnnnnnnnnnnnnnnnnnnnnnnnnnnnnnnnnnnnnnnnnnnnnnnnnnnnnnnnnnnnnnnnnnnnnnnnnnnnnnnnnnnnnnnnnnnnnnnnnnnnnnnnnnnnnnnnnnnnnnnnnnnnnnnnnnnnnnnnnnnnnnnnnnnnnnnnnnnnnnnnnnnnnnnnnnnnnnnnnnnnnnnnnnnnnnnnnnnnnnnnnnnnnnnnnnnnnnnnnnnnnnnnnnnnnnnnnnnnnnnnnnnnnnnnnnnnnnnnnnnnnnnnnnnnnnnnnnnnnnnnnnnnnnnnnnnnnnnnnnnnnnnnnnnnnnnnnnnnnnnnnnnnnnnnnnnnnnnnnnnnnnnnnnnnnnnnnnnnnnnnnnnnnnnnnnnnnnnnnnnnnnnnnnnnnnnnnnnnnnnnnnnnnnnnnnnnnnnnnnnnnnnnnnnnnnnnnnnnnnnnnnnnnnnnnnnnnnnnnnnnnnnnnnnnnnnnnnnnnnnnnnnnnnnnnnnnnnnnnnnnnnnnnnnnnnnnnnnnnnnnnnnnnnnnnnnnnnnnnnnnnnnnnnnnnnnnnnnnnnnnnnnnnnnnnnnnnnnnnnnnnnnnnnnnnnnnnnnnnnnnnnnnnnnnnnnnnnnnnnnnnnnnnnnnnnnnnnnnnnnnnnnnnnnnnnnnnnnnnnnnnnnnnnnnnnnnnnnnnnnnnnnnnnnnnnnnnnnnnnnnnnnnnnnnnnnnnnnnnnnnnnnnnnnnnnnnnnnnnnnnnnnnnnnnnnnnnnnnnnnnnnnnnnnnnnnnnnnnnnnnnnnnnnnnnnnnnnnnnnnnnnnnnnnnnnnnnnnnnnnnnnnnnnnnnnnnnnnnnnnnnnnnnnnnnnnnnnnnnnnnnnnnnnnnnnnnnnnnnnnnnnnnnnnnnnnnnnnnnnnnnnnnnnnnnnnnnnnnnnnnnnnnnnnnnnnnnnnnnnnnnnnnnnnnnnnnnnnnnnnnnnnnnnnnnnnnnnnnnnnnnnnnnnnnnnnnnnnnnnnnnnnnnnnnnnnnnnnnnnnnnnnnnnnnnnnnnnnnnnnnnnnnnnnnnnnnnnnnnnnnnnnnnnnnnnnnnnnnnnnnnnnnnnnnnnnnnnnnnnnnnnnnnnnnnnnnnnnnnnnnnnnnnnnnnnnnnnnnnnnnnnnnnnnnnnnnnnnnnnnnnnnnnnnnnnnnnnnnnnnnnnnnnnnnnnnnnnnnnnnnnnnnnnnnnnnnnnnnnnnnnnnnnnnnnnnnnnnnnnnnnnnnnnnnnnnnnnnnnnnnnnnnnnnnnnnnnnnnnnnnnnnnnnnnnnnnnnnnnnnnnnnnnnnnnnnnnnnnnnnnnnnnnnnnnnnnnnnnnnnnnnnnnnnnnnnnnnnnnnnnnnnnnnnnnnnnnnnnnnnnnnnnnnnnnnnnnnnnnnnnnnnnnnnnnnnnnnnnnnnnnnnnnnnnnnnnnnnnnnnnnnnnnnnnnnnnnnnnnnnnnnnnnnnnnnnnnnnnnnnnnnnnnnnnnnnnnnnnnnnnnnnnnnnnnnnnnnnnnnnnnnnnnnnnnnnnnnnnnnnnnnnnnnnnnnnnnnnnnnnnnnnnnnnnnnnnnnnnnnnnnnnnnnnnnnnnnnnnnnnnnnnnnnnnnnnnnnnnnnnnnnnnnnnnnnnnnnnnnnnnnnnnnnnnnnnnnnnnnnnnnnnnnnnnnnnnnnnnnnnnnnnnnnnnnnnnnnnnnnnnnnnnnnnnnnnnnnnnnnnnnnnnnnnnnnnnnnnnnnnnnnnnnnnnnnnnnnnnnnnnnnnnnnnnnnnnnnnnnnnnnnnnnnnnnnnnnnnnnnnnnnnnnnnnnnnnnnnnnnnnnnnnnnnnnnnnnnnnnnnnnnnnnnnnnnnnnnnnnnnnnnnnnnnnnnnnnnnnnnnnnnnnnnnnnnnnnnnnnnnnnnnnnnnnnnnnnnnnnnnnnnnnnnnnnnnnnnnnnnnnnnnnnnnnnnnnnnnnnnnnnnnnnnnnnnnnnnnnnnnnnnnnnnnnnnnnnnnnnnnnnnnnnnnnnnnnnnnnnnnnnnnnnnnnnnnnnnnnnnnnnnnnnnnnnnnnnnnnnnnnnnnnnnnnnnnnnnnnnnnnnnnnnnnnnnnnnnnnnnnnnnnnnnnnnnnnnnnnnnnnnnnnnnnnnnnnnnnnnnnnnnnnnnnnnnnnnnnnnnnnnnnnnnnnnnnnnnnnnnnnnnnnnnnnnnnnnnnnnnnnnnnnnnnnnnnnnnnnnnnnnnnnnnnnnnnnnnnnnnnnnnnnnnnnnnnnnnnnnnnnnnnnnnnnnnnnnnnnnnnnnnnnnnnnnnnnnnnnnnnnnnnnnnnnnnnnnnnnnnnnnnnnnnnnnnnnnnnnnnnnnnnnnnnnnnnnnnnnnnnnnnnnnnnnnnnnnnnnnnnnnnnnnnnnnnnnnnnnnnnnnnnnnnnnnnnnnnnnnnnnnnnnnnnnnnnnnnnnnnnnnnnnnnnnnnnnnnnnnnnnnnnnnnnnnnnnnnnnnnnnnnnnnnnnnnnnnnnnnnnnnnnnnnnnnnnnnnnnnnnnnnnnnnnnnnnnnnnnnnnnnnnnnnnnnnnnnnnnnnnnnnnnnnnnnnnnnnnnnnnnnnnnnnnnnnnnnnnnnnnnnnnnnnnnnnnnnnnnnnnnnnnnnnnnnnnnnnnnnnnnnnnnnnnnnnnnnnnnnnnnnnnnnnnnnnnnnnnnnnnnnnnnnnnnnnnnnnnnnnnnnnnnnnnnnnnnnnnnnnnnnnnnnnnnnnnnnnnnnnnnnnnnnnnnnnnnnnnnnnnnnnnnnnnnnnnnnnnnnnnnnnnnnnnnnnnnnnnnnnnnnnnnnnnnnnnnnnnnnnnnnnnnnnnnnnnnnnnnnnnnnnnnnnnnnnnnnnnnnnnnnnnnnnnnnnnnnnnnnnnnnnnnnnnnnnnnnnnnnnnnnnnnnnnnnnnnnnnnnnnnnnnnnnnnnnnnnnnnnnnnnnnnnnnnnnnnnnnnnnnnnnnnnnnnnnnnnnnnnnnnnnnnnnnnnnnnnnnnnnnnnnnnnnnnnnnnnnnnnnnnnnnnnnnnnnnnnnnnnnnnnnnnnnnnnnnnnnnnnnnnnnnnnnnnnnnnnnnnnnnnnnnnnnnnnnnnnnnnnnnnnnnnnnnnnnnnnnnnnnnnnnnnnnnnnnnnnnnnnnnnnnnnnnnnnnnnnnnnnnnnnnnnnnnnnnnnnnnnnnnnnnnnnnnnnnnnnnnnnnnnnnnnnnnnnnnnnnnnnnnnnnnnnnnnnnnnnnnnnnnnnnnnnnnnnnnnnnnnnnnnnnnnnnnnnnnnnnnnnnnnnnnnnnnnnnnnnnnnnnnnnnnnnnnnnnnnnnnnnnnnnnnnnnnnnnnnnnnnnnnnnnnnnnnnnnnnnnnnnnnnnnnnnnnnnnnnnnnnnnnnnnnnnnnnnnnnnnnnnnnnnnnnnnnnnnnnnnnnnnnnnnnnnnnnnnnnnnnnnnnnnnnnnnnnnnnnnnnnnnnnnnnnnnnnnnnnnnnnnnnnnnnnnnnnnnnnnnnnnnnnnnnnnnnnnnnnnnnnnnnnnnnnnnnnnnnnnnnnnnnnnnnnnnnnnnnnnnnnnnnnnnnnnnnnnnnnnnnnnnnnnnnnnnnnnnnnnnnnnnnnnnnnnnnnnnnnnnnnnnnnnnnnnnnnnnnnnnnnnnnnnnnnnnnnnnnnnnnnnnnnnnnnnnnnnnnnnnnnnnnnnnnnnnnnnnnnnnnnnnnnnnnnnnnnnnnnnnnnnnnnnnnnnnnnnnnnnnnnnnnnnnnnnnnnnnnnnnnnnnnnnnnnnnnnnnnnnnnnnnnnnnnnnnnnnnnnnnnnnnnnnnnnnnnnnnnnnnnnnnnnnnnnnnnnnnnnnnnnnnnnnnnnnnnnnnnnnnnnnnnnnnnnnnnnnnnnnnnnnnnnnnnnnnnnnnnnnnnnnnnnnnnnnnnnnnnnnnnnnnnnnnnnnnnnnnnnnnnnnnnnnnnnnnnnnnnnnnnnnnnnnnnnnnnnnnnnnnnnnnnnnnnnnnnnnnnnnnnnnnnnnnnnnnnnnnnnnnnnnnnnnnnnnnnnnnnnnnnnnnnnnnnnnnnnnnnnnnnnnnnnnnnnnnnnnnnnnnnnnnnnnnnnnnnnnnnnnnnnnnnnnnnnnnnnnnnnnnnnnnnnnnnnnnnnnnnnnnnnnnnnnnnnnnnnnnnnnnnnnnnnnnnnnnnnnnnnnnnnnnnnnnnnnnnnnnnnnnnnnnnnnnnnnnnnnnnnnnnnnnnnnnnnnnnnnnnnnnnnnnnnnnnnnnnnnnnnnnnnnnnnnnnnnnnnnnnnnnnnnnnnnnnnnnnnnnnnnnnnnnnnnnnnnnnnnnnnnnnnnnnnnnnnnnnnnnnnnnnnnnnnnnnnnnnnnnnnnnnnnnnnnnnnnnnnnnnnnnnnnnnnnnnnnnnnnnnnnnnnnnnnnnnnnnnnnnnnnnnnnnnnnnnnnnnnnnnnnnnnnnnnnnnnnnnnnnnnnnnnnnnnnnnnnnnnnnnnnnnnnnnnnnnnnnnnnnnnnnnnnnnnnnnnnnnnnnnnnnnnnnnnnnnnnnnnnnnnnnnnnnnnnnnnnnnnnnnnnnnnnnnnnnnnnnnnnnnnnnnnnnnnnnnnnnnnnnnnnnnnnnnnnnnnnnnnnnnnnnnnnnnnnnnnnnnnnnnnnnnnnnnnnnnnnnnnnnnnnnnnnnnnnnnnnnnnnnnnnnnnnnnnnnnnnnnnnnnnnnnnnnnnnnnnnnnnnnnnnnnnnnnnnnnnnnnnnnnnnnnnnnnnnnnnnnnnnnnnnnnnnnnnnnnnnnnnnnnnnnnnnnnnnnnnnnnnnnnnnnnnnnnnnnnnnnnnnnnnnnnnnnnnnnnnnnnnnnnnnnnnnnnnnnnnnnnnnnnnnnnnnnnnnnnnnnnnnnnnnnnnnnnnnnnnnnnnnnnnnnnnnnnnnnnnnnnnnnnnnnnnnnnnnnnnnnnnnnnnnnnnnnnnnnnnnnnnnnnnnnnnnnnnnnnnnnnnnnnnnnnnnnnnnnnnnnnnnnnnnnnnnnnnnnnnnnnnnnnnnnnnnnnnnnnnnnnnnnnnnnnnnnnnnnnnnnnnnnnnnnnnnnnnnnnnnnnnnnnnnnnnnnnnnnnnnnnnnnnnnnnnnnnnnnnnnnnnnnnnnnnnnnnnnnnnnnnnnnnnnnnnnnnnnnnnnnnnnnnnnnnnnnnnnnnnnnnnnnnnnnnnnnnnnnnnnnnnnnnnnnnnnnnnnnnnnnnnnnnnnnnnnnnnnnnnnnnnnnnnnnnnnnnnnnnnnnnnnnnnnnnnnnnnnnnnnnnnnnnnnnnnnnnnnnnnnnnnnnnnnnnnnnnnnnnnnnnnnnnnnnnnnnnnnnnnnnnnnnnnnnnnnnnnnnnnnnnnnnnnnnnnnnnnnnnnnnnnnnnnnnnnnnnnnnnnnnnnnnnnnnnnnnnnnnnnnnnnnnnnnnnnnnnnnnnnnnnnnnnnnnnnnnnnnnnnnnnnnnnnnnnnnnnnnnnnnnnnnnnnnnnnnnnnnnnnnnnnnnnnnnnnnnnnnnnnnnnnnnnnnnnnnnnnnnnnnnnnnnnnnnnnnnnnnnnnnnnnnnnnnnnnnnnnnnnnnnnnnnnnnnnnnnnnnnnnnnnnnnnnnnnnnnnnnnnnnnnnnnnnnnnnnnnnnnnnnnnnnnnnnnnnnnnnnnnnnnnnnnnnnnnnnnnnnnnnnnnnnnnnnnnnnnnnnnnnnnnnnnnnnnnnnnnnnnnnnnnnnnnnnnnnnnnnnnnnnnnnnnnnnnnnnnnnnnnnnnnnnnnnnnnnnnnnnnnnnnnnnnnnnnnnnnnnnnnnnnnnnnnnnnnnnnnnnnnnnnnnnnnnnnnnnnnnnnnnnnnnnnnnnnnnnnnnnnnnnnnnnnnnnnnnnnnnnnnnnnnnnnnnnnnnnnnnnnnnnnnnnnnnnnnnnnnnnnnnnnnnnnnnnnnnnnnnnnnnnnnnnnnnnnnnnnnnnnnnnnnnnnnnnnnnnnnnnnnnnnnnnnnnnnnnnnnnnnnnnnnnnnnnnnnnnnnnnnnnnnnnnnnnnnnnnnnnnnnnnnnnnnnnnnnnnnnnnnnnnnnnnnnnnnnnnnnnnnnnnnnnnnnnnnnnnnnnnnnnnnnnnnnnnnnnnnnnnnnnnnnnnnnnnnnnnnnnnnnnnnnnnnnnnnnnnnnnnnnnnnnnnnnnnnnnnnnnnnnnnnnnnnnnnnnnnnnnnnnnnnnnnnnnnnnnnnnnnnnnnnnnnnnnnnnnnnnnnnnnnnnnnnnnnnnnnnnnnnnnnnnnnnnnnnnnnnnnnnnnnnnnnnnnnnnnnnnnnnnnnnnnnnnnnnnnnnnnnnnnnnnnnnnnnnnnnnnnnnnnnnnnnnnnnnnnnnnnnnnnnnnnnnnnnnnnnnnnnnnnnnnnnnnnnnnnnnnnnnnnnnnnnnnnnnnnnnnnnnnnnnnnnnnnnnnnnnnnnnnnnnnnnnnnnnnnnnnnnnnnnnnnnnnnnnnnnnnnnnnnnnnnnnnnnnnnnnnnnnnnnnnnnnnnnnnnnnnnnnnnnnnnnnnnnnnnnnnnnnnnnnnnnnnnnnnnnnnnnnnnnnnnnnnnnnnnnnnnnnnnnnnnnnnnnnnnnnnnnnnnnnnnnnnnnnnnnnnnnnnnnnnnnnnnnnnnnnnnnnnnnnnnnnnnnnnnnnnnnnnnnnnnnnnnnnnnnnnnnnnnnnnnnnnnnnnnnnnnnnnnnnnnnnnnnnnnnnnnnnnnnnnnnnnnnnnnnnnnnnnnnnnnnnnnnnnnnnnnnnnnnnnnnnnnnnnnnnnnnnnnnnnnnnnnnnnnnnnnnnnnnnnnnnnnnnnnnnnnnnnnnnnnnnnnnnnnnnnnnnnnnnnnnnnnnnnnnnnnnnnnnnnnnnnnnnnnnnnnnnnnnnnnnnnnnnnnnnnnnnnnnnnnnnnnnnnnnnnnnnnnnnnnnnnnnnnnnnnnnnnnnnnnnnnnnnnnnnnnnnnnnnnnnnnnnnnnnnnnnnnnnnnnnnnnnnnnnnnnnnnnnnnnnnnnnnnnnnnnnnnnnnnnnnnnnnnnnnnnnnnnnnnnnnnnnnnnnnnnnnnnnnnnnnnnnnnnnnnnnnnnnnnnnnnnnnnnnnnnnnnnnnnnnnnnnnnnnnnnnnnnnnnnnnnnnnnnnnnnnnnnnnnnnnnnnnnnnnnnnnnnnnnnnnnnnnnnnnnnnnnnnnnnnnnnnnnnnnnnnnnnnnnnnnnnnnnnnnnnnnnnnnnnnnnnnnnnnnnnnnnnnnnnnnnnnnnnnnnnnnnnnnnnnnnnnnnnnnnnnnnnnnnnnnnnnnnnnnnnnnnnnnnnnnnnnnnnnnnnnnnnnnnnnnnnnnnnnnnnnnnnnnnnnnnnnnnnnnnnnnnnnnnnnnnnnnnnnnnnnnnnnnnnnnnnnnnnnnnnnnnnnnnnnnnnnnnnnnnnnnnnnnnnnnnnnnnnnnnnnnnnnnnnnnnnnnnnnnnnnnnnnnnnnnnnnnnnnnnnnnnnnnnnnnnnnnnnnnnnnnnnnnnnnnnnnnnnnnnnnnnnnnnnnnnnnnnnnnnnnnnnnnnnnnnnnnnnnnnnnnnnnnnnnnnnnnnnnnnnnnnnnnnnnnnnnnnnnnnnnnnnnnnnnnnnnnnnnnnnnnnnnnnnnnnnnnnnnnnnnnnnnnnnnnnnnnnnnnnnnnnnnnnnnnnnnnnnnnnnnnnnnnnnnnnnnnnnnnnnnnnnnnnnnnnnnnnnnnnnnnnnnnnnnnnnnnnnnnnnnnnnnnnnnnnnnnnnnnnnnnnnnnnnnnnnnnnnnnnnnnnnnnnnnnnnnnnnnnnnnnnnnnnnnnnnnnnnnnnnnnnnnnnnnnnnnnnnnnnnnnnnnnnnnnnnnnnnnnnnnnnnnnnnnnnnnnnnnnnnnnnnnnnnnnnnnnnnnnnnnnnnnnnnnnnnnnnnnnnnnnnnnnnnnnnnnnnnnnnnnnnnnnnnnnnnnnnnnnnnnnnnnnnnnnnnnnnnnnnnnnnnnnnnnnnnnnnnnnnnnnnnnnnnnnnnnnnnnnnnnnnnnnnnnnnnnnnnnnnnnnnnnnnnnnnnnnnnnnnnnnnnnnnnnnnnnnnnnnnnnnnnnnnnnnnnnnnnnnnnnnnnnnnnnnnnnnnnnnnnnnnnnnnnnnnnnnnnnnnnnnnnnnnnnnnnnnnnnnnnnnnnnnnnnnnnnnnnnnnnnnnnnnnnnnnnnnnnnnnnnnnnnnnnnnnnnnnnnnnnnnnnnnnnnnnnnnnnnnnnnnnnnnnnnnnnnnnnnnnnnnnnnnnnnnnnnnnnnnnnnnnnnnnnnnnnnnnnnnnnnnnnnnnnnnnnnnnnnnnnnnnnnnnnnnnnnnnnnnnnnnnnnnnnnnnnnnnnnnnnnnnnnnnnnnnnnnnnnnnnnnnnnnnnnnnnnnnnnnnnnnnnnnnnnnnnnnnnnnnnnnnnnnnnnnnnnnnnnnnnnnnnnnnnnnnnnnnnnnnnnnnnnnnnnnnnnnnnnnnnnnnnnnnnnnnnnnnnnnnnnnnnnnnnnnnnnnnnnnnnnnnnnnnnnnnnnnnnnnnnnnnnnnnnnnnnnnnnnnnnnnnnnnnnnnnnnnnnnnnnnnnnnnnnnnnnnnnnnnnnnnnnnnnnnnnnnnnnnnnnnnnnnnnnnnnnnnnnnnnnnnnnnnnnnnnnnnnnnnnnnnnnnnnnnnnnnnnnnnnnnnnnnnnnnnnnnnnnnnnnnnnnnnnnnnnnnnnnnnnnnnnnnnnnnnnnnnnnnnnnnnnnnnnnnnnnnnnnnnnnnnnnnnnnnnnnnnnnnnnnnnnnnnnnnnnnnnnnnnnnnnnnnnnnnnnnnnnnnnnnnnnnnnnnnnnnnnnnnnnnnnnnnnnnnnnnnnnnnnnnnnnnnnnnnnnnnnnnnnnnnnnnnnnnnnnnnnnnnnnnnnnnnnnnnnnnnnnnnnnnnnnnnnnnnnnnnnnnnnnnnnnnnnnnnnnnnnnnnnnnnnnnnnnnnnnnnnnnnnnnnnnnnnnnnnnnnnnnnnnnnnnnnnnnnnnnnnnnnnnnnnnnnnnnnnnnnnnnnnnnnnnnnnnnnnnnnnnnnnnnnnnnnnnnnnnnnnnnnnnnnnnnnnnnnnnnnnnnnnnnnnnnnnnnnnnnnnnnnnnnnnnnnnnnnnnnnnnnnnnnnnnnnnnnnnnnnnnnnnnnnnnnnnnnnnnnnnnnnnnnnnnnnnnnnnnnnnnnnnnnnnnnnnnnnnnnnnnnnnnnnnnnnnnnnnnnnnnnnnnnnnnnnnnnnnnnnnnnnnnnnnnnnnnnnnnnnnnnnnnnnnnnnnnnnnnnnnnnnnnnnnnnnnnnnnnnnnnnnnnnnnnnnnnnnnnnnnnnnnnnnnnnnnnnnnnnnnnnnnnnnnnnnnnnnnnnnnnnnnnnnnnnnnnnnnnnnnnnnnnnnnnnnnnnnnnnnnnnnnnnnnnnnnnnnnnnnnnnnnnnnnnnnnnnnnnnnnnnnnnnnnnnnnnnnnnnnnnnnnnnnnnnnnnnnnnnnnnnnnnnnnnnnnnnnnnnnnnnnnnnnnnnnnnnnnnnnnnnnnnnnnnnnnnnnnnnnnnnnnnnnnnnnnnnnnnnnnnnnnnnnnnnnnnnnnnnnnnnnnnnnnnnnnnnnnnnnnnnnnnnnnnnnnnnnnnnnnnnnnnnnnnnnnnnnnnnnnnnnnnnnnnnnnnnnnnnnnnnnnnnnnnnnnnnnnnnnnnnnnnnnnnnnnnnnnnnnnnnnnnnnnnnnnnnnnnnnnnnnnnnnnnnnnnnnnnnnnnnnnnnnnnnnnnnnnnnnnnnnnnnnnnnnnnnnnnnnnnnnnnnnnnnnnnnnnnnnnnnnnnnnnnnnnnnnnnnnnnnnnnnnnnnnnnnnnnnnnnnnnnnnnnnnnnnnnnnnnnnnnnnnnnnnnnnnnnnnnnnnnnnnnnnnnnnnnnnnnnnnnnnnnnnnnnnnnnnnnnnnnnnnnnnnnnnnnnnnnnnnnnnnnnnnnnnnnnnnnnnnnnnnnnnnnnnnnnnnnnnnnnnnnnnnnnnnnnnnnnnnnnnnnnnnnnnnnnnnnnnnnnnnnnnnnnnnnnnnnnnnnnnnnnnnnnnnnnnnnnnnnnnnnnnnnnnnnnnnnnnnnnnnnnnnnnnnnnnnnnnnnnnnnnnnnnnnnnnnnnnnnnnnnnnnnnnnnnnnnnnnnnnnnnnnnnnnnnnnnnnnnnnnnnnnnnnnnnnnnnnnnnnnnnnnnnnnnnnnnnnnnnnnnnnnnnnnnnnnnnnnnnnnnnnnnnnnnnnnnnnnnnnnnnnnnnnnnnnnnnnnnnnnnnnnnnnnnnnnnnnnnnnnnnnnnnnnnnnnnnnnnnnnnnnnnnnnnnnnnnnnnnnnnnnnnnnnnnnnnnnnnnnnnnnnnnnnnnnnnnnnnnnnnnnnnnnnnnnnnnnnnnnnnnnnnnnnnnnnnnnnnnnnnnnnnnnnnnnnnnnnnnnnnnnnnnnnnnnnnnnnnnnnnnnnnnnnnnnnnnnnnnnnnnnnnnnnnnnnnnnnnnnnnnnnnnnnnnnnnnnnnnnnnnnnnnnnnnnnnnnnnnnnnnnnnnnnnnnnnnnnnnnnnnnnnnnnnnnnnnnnnnnnnnnnnnnnnnnnnnnnnnnnnnnnnnnnnnnnnnnnnnnnnnnnnnnnnnnnnnnnnnnnnnnnnnnnnnnnnnnnnnnnnnnnnnnnnnnnnnnnnnnnnnnnnnnnnnnnnnnnnnnnnnnnnnnnnnnnnnnnnnnnnnnnnnnnnnnnnnnnnnnnnnnnnnnnnnnnnnnnnnnnnnnnnnnnnnnnnnnnnnnnnnnnnnnnnnnnnnnnnnnnnnnnnnnnnnnnnnnnnnnnnnnnnnnnnnnnnnnnnnnnnnnnnnnnnnnnnnnnnnnnnnnnnnnnnnnnnnnnnnnnnnnnnnnnnnnnnnnnnnnnnnnnnnnnnnnnnnnnnnnnnnnnnnnnnnnnnnnnnnnnnnnnnnnnnnnnnnnnnnnnnnnnnnnnnnnnnnnnnnnnnnnnnnnnnnnnnnnnnnnnnnnnnnnnnnnnnnnnnnnnnnnnnnnnnnnnnnnnnnnnnnnnnnnnnnnnnnnnnnnnnnnnnnnnnnnnnnnnnnnnnnnnnnnnnnnnnnnnnnnnnnnnnnnnnnnnnnnnnnnnnnnnnnnnnnnnnnnnnnnnnnnnnnnnnnnnnnnnnnnnnnnnnnnnnnnnnnnnnnnnnnnnnnnnnnnnnnnnnnnnnnnnnnnnnnnnnnnnnnnnnnnnnnnnnnnnnnnnnnnnnnnnnnnnnnnnnnnnnnnnnnnnnnnnnnnnnnnnnnnnnnnnnnnnnnnnnnnnnnnnnnnnnnnnnnnnnnnnnnnnnnnnnnnnnnnnnnnnnnnnnnnnnnnnnnnnnnnnnnnnnnnnnnnnnnnnnnnnnnnnnnnnnnnnnnnnnnnnnnnnnnnnnnnnnnnnnnnnnnnnnnnnnnnnnnnnnnnnnnnnnnnnnnnnnnnnnnnnnnnnnnnnnnnnnnnnnnnnnnnnnnnnnnnnnnnnnnnnnnnnnnnnnnnnnnnnnnnnnnnnnnnnnnnnnnnnnnnnnnnnnnnnnnnnnnnnnnnnnnnnnnnnnnnnnnnnnnnnnnnnnnnnnnnnnnnnnnnnnnnnnnnnnnnnnnnnnnnnnnnnnnnnnnnnnnnnnnnnnnnnnnnnnnnnnnnnnnnnnnnnnnnnnnnnnnnnnnnnnnnnnnnnnnnnnnnnnnnnnnnnnnnnnnnnnnnnnnnnnnnnnnnnnnnnnnnnnnnnnnnnnnnnnnnnnnnnnnnnnnnnnnnnnnnnnnnnnnnnnnnnnnnnnnnnnnnnnnnnnnnnnnnnnnnnnnnnnnnnnnnnnnnnnnnnnnnnnnnnnnnnnnnnnnnnnnnnnnnnnnnnnnnnnnnnnnnnnnnnnnnnnnnnnnnnnnnnnnnnnnnnnnnnnnnnnnnnnnnnnnnnnnnnnnnnnnnnnnnnnnnnnnnnnnnnnnnnnnnnnnnnnnnnnnnnnnnnnnnnnnnnnnnnnnnnnnnnnnnnnnnnnnnnnnnnnnnnnnnnnnnnnnnnnnnnnnnnnnnnnnnnnnnnnnnnnnnnnnnnnnnnnnnnnnnnnnnnnnnnnnnnnnnnnnnnnnnnnnnnnnnnnnnnnnnnnnnnnnnnnnnnnnnnnnnnnnnnnnnnnnnnnnnnnnnnnnnnnnnnnnnnnnnnnnnnnnnnnnnnnnnnnnnnnnnnnnnnnnnnnnnnnnnnnnnnnnnnnnnnnnnnnnnnnnnnnnnnnnnnnnnnnnnnnnnnnnnnnnnnnnnnnnnnnnnnnnnnnnnnnnnnnnnnnnnnnnnnnnnnnnnnnnnnnnnnnnnnnnnnnnnnnnnnnnnnnnnnnnnnnnnnnnnnnnnnnnnnnnnnnnnnnnnnnnnnnnnnnnnnnnnnnnnnnnnnnnnnnnnnnnnnnnnnnnnnnnnnnnnnnnnnnnnnnnnnnnnnnnnnnnnnnnnnnnnnnnnnnnnnnnnnnnnnnnnnnnnnnnnnnnnnnnnnnnnnnnnnnnnnnnnnnnnnnnnnnnnnnnnnnnnnnnnnnnnnnnnnnnnnnnnnnnnnnnnnnnnnnnnnnnnnnnnnnnnnnnnnnnnnnnnnnnnnnnnnnnnnnnnnnnnnnnnnnnnnnnnnnnnnnnnnnnnnnnnnnnnnnnnnnnnnnnnnnnnnnnnnnnnnnnnnnnnnnnnnnnnnnnnnnnnnnnnnnnnnnnnnnnnnnnnnnnnnnnnnnnnnnnnnnnnnnnnnnnnnnnnnnnnnnnnnnnnnnnnnnnnnnnnnnnnnnnnnnnnnnnnnnnnnnnnnnnnnnnnnnnnnnnnnnnnnnnnnnnnnnnnnnnnnnnnnnnnnnnnnnnnnnnnnnnnnnnnnnnnnnnnnnnnnnnnnnnnnnnnnnnnnnnnnnnnnnnnnnnnnnnnnnnnnnnnnnnnnnnnnnnnnnnnnnnnnnnnnnnnnnnnnnnnnnnnnnnnnnnnnnnnnnnnnnnnnnnnnnnnnnnnnnnnnnnnnnnnnnnnnnnnnnnnnnnnnnnnnnnnnnnnnnnnnnnnnnnnnnnnnnnnnnnnnnnnnnnnnnnnnnnnnnnnnnnnnnnnnnnnnnnnnnnnnnnnnnnnnnnnnnnnnnnnnnnnnnnnnnnnnnnnnnnnnnnnnnnnnnnnnnnnnnnnnnnnnnnnnnnnnnnnnnnnnnnnnnnnnnnnnnnnnnnnnnnnnnnnnnnnnnnnnnnnnnnnnnnnnnnnnnnnnnnnnnnnnnnnnnnnnnnnnnnnnnnnnnnnnnnnnnnnnnnnnnnnnnnnnnnnnnnnnnnnnnnnnnnnnnnnnnnnnnnnnnnnnnnnnnnnnnnnnnnnnnnnnnnnnnnnnnnnnnnnnnnnnnnnnnnnnnnnnnnnnnnnnnnnnnnnnnnnnnnnnnnnnnnnnnnnnnnnnnnnnnnnnnnnnnnnnnnnnnnnnnnnnnnnnnnnnnnnnnnnnnnnnnnnnnnnnnnnnnnnnnnnnnnnnnnnnnnnnnnnnnnnnnnnnnnnnnnnnnnnnnnnnnnnnnnnnnnnnnnnnnnnnnnnnnnnnnnnnnnnnnnnnnnnnnnnnnnnnnnnnnnnnnnnnnnnnnnnnnnnnnnnnnnnnnnnnnnnnnnnnnnnnnnnnnnnnnnnnnnnnnnnnnnnnnnnnnnnnnnnnnnnnnnnnnnnnnnnnnnnnnnnnnnnnnnnnnnnnnnnnnnnnnnnnnnnnnnnnnnnnnnnnnnnnnnnnnnnnnnnnnnnnnnnnnnnnnnnnnnnnnnnnnnnnnnnnnnnnnnnnnnnnnnnnnnnnnnnnnnnnnnnnnnnnnnnnnnnnnnnnnnnnnnnnnnnnnnnnnnnnnnnnnnnnnnnnnnnnnnnnnnnnnnnnnnnnnnnnnnnnnnnnnnnnnnnnnnnnnnnnnnnnnnnnnnnnnnnnnnnnnnnnnnnnnnnnnnnnnnnnnnnnnnnnnnnnnnnnnnnnnnnnnnnnnnnnnnnnnnnnnnnnnnnnnnnnnnnnnnnnnnnnnnnnnnnnnnnnnnnnnnnnnnnnnnnnnnnnnnnnnnnnnnnnnnnnnnnnnnnnnnnnnnnnnnnnnnnnnnnnnnnnnnnnnnnnnnnnnnnnnnnnnnnnnnnnnnnnnnnnnnnnnnnnnnnnnnnnnnnnnnnnnnnnnnnnnnnnnnnnnnnnnnnnnnnnnnnnnnnnnnnnnnnnnnnnnnnnnnnnnnnnnnnnnnnnnnnnnnnnnnnnnnnnnnnnnnnnnnnnnnnnnnnnnnnnnnnnnnnnnnnnnnnnnnnnnnnnnnnnnnnnnnnnnnnnnnnnnnnnnnnnnnnnnnnnnnnnnnnnnnnnnnnnnnnnnnnnnnnnnnnnnnnnnnnnnnnnnnnnnnnnnnnnnnnnnnnnnnnnnnnnnnnnnnnnnnnnnnnnnnnnnnnnnnnnnnnnnnnnnnnnnnnnnnnnnnnnnnnnnnnnnnnnnnnnnnnnnnnnnnnnnnnnnnnnnnnnnnnnnnnnnnnnnnnnnnnnnnnnnnnnnnnnnnnnnnnnnnnnnnnnnnnnnnnnnnnnnnnnnnnnnnnnnnnnnnnnnnnnnnnnnnnnnnnnnnnnnnnnnnnnnnnnnnnnnnnnnnnnnnnnnnnnnnnnnnnnnnnnnnnnnnnnnnnnnnnnnnnnnnnnnnnnnnnnnnnnnnnnnnnnnnnnnnnnnnnnnnnnnnnnnnnnnnnnnnnnnnnnnnnnnnnnnnnnnnnnnnnnnnnnnnnnnnnnnnnnnnnnnnnnnnnnnnnnnnnnnnnnnnnnnnnnnnnnnnnnnnnnnnnnnnnnnnnnnnnnnnnnnnnnnnnnnnnnnnnnnnnnnnnnnnnnnnnnnnnnnnnnnnnnnnnnnnnnnnnnnnnnnnnnnnnnnnnnnnnnnnnnnnnnnnnnnnnnnnnnnnnnnnnnnnnnnnnnnnnnnnnnnnnnnnnnnnnnnnnnnnnnnnnnnnnnnnnnnnnnnnnnnnnnnnnnnnnnnnnnnnnnnnnnnnnnnnnnnnnnnnnnnnnnnnnnnnnnnnnnnnnnnnnnnnnnnnnnnnnnnnnnnnnnnnnnnnnnnnnnnnnnnnnnnnnnnnnnnnnnnnnnnnnnnnnnnnnnnnnnnnnnnnnnnnnnnnnnnnnnnnnnnnnnnnnnnnnnnnnnnnnnnnnnnnnnnnnnnnnnnnnnnnnnnnnnnnnnnnnnnnnnnnnnnnnnnnnnnnnnnnnnnnnnnnnnnnnnnnnnnnnnnnnnnnnnnnnnnnnnnnnnnnnnnnnnnnnnnnnnnnnnnnnnnnnnnnnnnnnnnnnnnnnnnnnnnnnnnnnnnnnnnnnnnnnnnnnnnnnnnnnnnnnnnnnnnnnnnnnnnnnnnnnnnnnnnnnnnnnnnnnnnnnnnnnnnnnnnnnnnnnnnnnnnnnnnnnnnnnnnnnnnnnnnnnnnnnnnnnnnnnnnnnnnnnnnnnnnnnnnnnnnnnnnnnnnnnnnnnnnnnnnnnnnnnnnnnnnnnnnnnnnnnnnnnnnnnnnnnnnnnnnnnnnnnnnnnnnnnnnnnnnnnnnnnnnnnnnnnnnnnnnnnnnnnnnnnnnnnnnnnnnnnnnnnnnnnnnnnnnnnnnnnnnnnnnnnnnnnnnnnnnnnnnnnnnnnnnnnnnnnnnnnnnnnnnnnnnnnnnnnnnnnnnnnnnnnnnnnnnnnnnnnnnnnnnnnnnnnnnnnnnnnnnnnnnnnnnnnnnnnnnnnnnnnnnnnnnnnnnnnnnnnnnnnnnnnnnnnnnnnnnnnnnnnnnnnnnnnnnnnnnnnnnnnnnnnnnnnnnnnnnnnnnnnnnnnnnnnnnnnnnnnnnnnnnnnnnnnnnnnnnnnnnnnnnnnnnnnnnnnnnnnnnnnnnnnnnnnnnnnnnnnnnnnnnnnnnnnnnnnnnnnnnnnnnnnnnnnnnnnnnnnnnnnnnnnnnnnnnnnnnnnnnnnnnnnnnnnnnnnnnnnnnnnnnnnnnnnnnnnnnnnnnnnnnnnnnnnnnnnnnnnnnnnnnnnnnnnnnnnnnnnnnnnnnnnnnnnnnnnnnnnnnnnnnnnnnnnnnnnnnnnnnnnnnnnnnnnnnnnnnnnnnnnnnnnnnnnnnnnnnnnnnnnnnnnnnnnnnnnnnnnnnnnnnnnnnnnnnnnnnnnnnnnnnnnnnnnnnnnnnnnnnnnnnnnnnnnnnnnnnnnnnnnnnnnnnnnnnnnnnnnnnnnnnnnnnnnnnnnnnnnnnnnnnnnnnnnnnnnnnnnnnnnnnnnnnnnnnnnnnnnnnnnnnnnnnnnnnnnnnnnnnnnnnnnnnnnnnnnnnnnnnnnnnnnnnnnnnnnnnnnnnnnnnnnnnnnnnnnnnnnnnnnnnnnnnnnnnnnnnnnnnnnnnnnnnnnnnnnnnnnnnnnnnnnnnnnnnnnnnnnnnnnnnnnnnnnnnnnnnnnnnnnnnnnnnnnnnnnnnnnnnnnnnnnnnnnnnnnnnnnnnnnnnnnnnnnnnnnnnnnnnnnnnnnnnnnnnnnnnnnnnnnnnnnnnnnnnnnnnnnnnnnnnnnnnnnnnnnnnnnnnnnnnnnnnnnnnnnnnnnnnnnnnnnnnnnnnnnnnnnnnnnnnnnnnnnnnnnnnnnnnnnnnnnnnnnnnnnnnnnnnnnnnnnnnnnnnnnnnnnnnnnnnnnnnnnnnnnnnnnnnnnnnnnnnnnnnnnnnnnnnnnnnnnnnnnnnnnnnnnnnnnnnnnnnnnnnnnnnnnnnnnnnnnnnnnnnnnnnnnnnnnnnnnnnnnnnnnnnnnnnnnnnnnnnnnnnnnnnnnnnnnnnnnnnnnnnnnnnnnnnnnnnnnnnnnnnnnnnnnnnnnnnnnnnnnnnnnnnnnnnnnnnnnnnnnnnnnnnnnnnnnnnnnnnnnnnnnnnnnnnnnnnnnnnnnnnnnnnnnnnnnnnnnnnnnnnnnnnnnnnnnnnnnnnnnnnnnnnnnnnnnnnnnnnnnnnnnnnnnnnnnnnnnnnnnnnnnnnnnnnnnnnnnnnnnnnnnnnnnnnnnnnnnnnnnnnnnnnnnnnnnnnnnnnnnnnnnnnnnnnnnnnnnnnnnnnnnnnnnnnnnnnnnnnnnnnnnnnnnnnnnnnnnnnnnnnnnnnnnnnnnnnnnnnnnnnnnnnnnnnnnnnnnnnnnnnnnnnnnnnnnnnnnnnnnnnnnnnnnnnnnnnnnnnnnnnnnnnnnnnnnnnnnnnnnnnnnnnnnnnnnnnnnnnnnnnnnnnnnnnnnnnnnnnnnnnnnnnnnnnnnnnnnnnnnnnnnnnnnnnnnnnnnnnnnnnnnnnnnnnnnnnnnnnnnnnnnnnnnnnnnnnnnnnnnnnnnnnnnnnnnnnnnnnnnnnnnnnnnnnnnnnnnnnnnnnnnnnnnnnnnnnnnnnnnnnnnnnnnnnnnnnnnnnnnnnnnnnnnnnnnnnnnnnnnnnnnnnnnnnnnnnnnnnnnnnnnnnnnnnnnnnnnnnnnnnnnnnnnnnnnnnnnnnnnnnnnnnnnnnnnnnnnnnnnnnnnnnnnnnnnnnnnnnnnnnnnnnnnnnnnnnnnnnnnnnnnnnnnnnnnnnnnnnnnnnnnnnnnnnnnnnnnnnnnnnnnnnnnnnnnnnnnnnnnnnnnnnnnnnnnnnnnnnnnnnnnnnnnnnnnnnnnnnnnnnnnnnnnnnnnnnnnnnnnnnnnnnnnnnnnnnnnnnnnnnnnnnnnnnnnnnnnnnnnnnnnnnnnnnnnnnnnnnnnnnnnnnnnnnnnnnnnnnnnnnnnnnnnnnnnnnnnnnnnnnnnnnnnnnnnnnnnnnnnnnnnnnnnnnnnnnnnnnnnnnnnnnnnnnnnnnnnnnnnnnnnnnnnnnnnnnnnnnnnnnnnnnnnnnnnnnnnnnnnnnnnnnnnnnnnnnnnnnnnnnnnnnnnnnnnnnnnnnnnnnnnnnnnnnnnnnnnnnnnnnnnnnnnnnnnnnnnnnnnnnnnnnnnnnnnnnnnnnnnnnnnnnnnnnnnnnnnnnnnnnnnnnnnnnnnnnnnnnnnnnnnnnnnnnnnnnnnnnnnnnnnnnnnnnnnnnnnnnnnnnnnnnnnnnnnnnnnnnnnnnnnnnnnnnnnnnnnnnnnnnnnnnnnnnnnnnnnnnnnnnnnnnnnnnnnnnnnnnnnnnnnnnnnnnnnnnnnnnnnnnnnnnnnnnnnnnnnnnnnnnnnnnnnnnnnnnnnnnnnnnnnnnnnnnnnnnnnnnnnnnnnnnnnnnnnnnnnnnnnnnnnnnnnnnnnnnnnnnnnnnnnnnnnnnnnnnnnnnnnnnnnnnnnnnnnnnnnnnnnnnnnnnnnnnnnnnnnnnnnnnnnnnnnnnnnnnnnnnnnnnnnnnnnnnnnnnnnnnnnnnnnnnnnnnnnnnnnnnnnnnnnnnnnnnnnnnnnnnnnnnnnnnnnnnnnnnnnnnnnnnnnnnnnnnnnnnnnnnnnnnnnnnnnnnnnnnnnnnnnnnnnnnnnnnnnnnnnnnnnnnnnnnnnnnnnnnnnnnnnnnnnnnnnnnnnnnnnnnnnnnnnnnnnnnnnnnnnnnnnnnnnnnnnnnnnnnnnnnnnnnnnnnnnnnnnnnnnnnnnnnnnnnnnnnnnnnnnnnnnnnnnnnnnnnnnnnnnnnnnnnnnnnnnnnnnnnnnnnnnnnnnnnnnnnnnnnnnnnnnnnnnnnnnnnnnnnnnnnnnnnnnnnnnnnnnnnnnnnnnnnnnnnnnnnnnnnnnnnnnnnnnnnnnnnnnnnnnnnnnnnnnnnnnnnnnnnnnnnnnnnnnnnnnnnnnnnnnnnnnnnnnnnnnnnnnnnnnnnnnnnnnnnnnnnnnnnnnnnnnnnnnnnnnnnnnnnnnnnnnnnnnnnnnnnnnnnnnnnnnnnnnnnnnnnnnnnnnnnnnnnnnnnnnnnnnnnnnnnnnnnnnnnnnnnnnnnnnnnnnnnnnnnnnnnnnnnnnnnnnnnnnnnnnnnnnnnnnnnnnnnnnnnnnnnnnnnnnnnnnnnnnnnnnnnnnnnnnnnnnnnnnnnnnnnnnnnnnnnnnnnnnnnnnnnnnnnnnnnnnnnnnnnnnnnnnnnnnnnnnnnnnnnnnnnnnnnnnnnnnnnnnnnnnnnnnnnnnnnnnnnnnnnnnnnnnnnnnnnnnnnnnnnnnnnnnnnnnnnnnnnnnnnnnnnnnnnnnnnnnnnnnnnnnnnnnnnnnnnnnnnnnnnnnnnnnnnnnnnnnnnnnnnnnnnnnnnnnnnnnnnnnnnnnnnnnnnnnnnnnnnnnnnnnnnnnnnnnnnnnnnnnnnnnnnnnnnnnnnnnnnnnnnnnnnnnnnnnnnnnnnnnnnnnnnnnnnnnnnnnnnnnnnnnnnnnnnnnnnnnnnnnnnnnnnnnnnnnnnnnnnnnnnnnnnnnnnnnnnnnnnnnnnnnnnnnnnnnnnnnnnnnnnnnnnnnnnnnnnnnnnnnnnnnnnnnnnnnnnnnnnnnnnnnnnnnnnnnnnnnnnnnnnnnnnnnnnnnnnnnnnnnnnnnnnnnnnnnnnnnnnnnnnnnnnnnnnnnnnnnnnnnnnnnnnnnnnnnnnnnnnnnnnnnnnnnnnnnnnnnnnnnnnnnnnnnnnnnnnnnnnnnnnnnnnnnnnnnnnnnnnnnnnnnnnnnnnnnnnnnnnnnnnnnnnnnnnnnnnnnnnnnnnnnnnnnnnnnnnnnnnnnnnnnnnnnnnnnnnnnnnnnnnnnnnnnnnnnnnnnnnnnnnnnnnnnnnnnnnnnnnnnnnnnnnnnnnnnnnnnnnnnnnnnnnnnnnnnnnnnnnnnnnnnnnnnnnnnnnnnnnnnnnnnnnnnnnnnnnnnnnnnnnnnnnnnnnnnnnnnnnnnnnnnnnnnnnnnnnnnnnnnnnnnnnnnnnnnnnnnnnnnnnnnnnnnnnnnnnnnnnnnnnnnnnnnnnnnnnnnnnnnnnnnnnnnnnnnnnnnnnnnnnnnnnnnnnnnnnnnnnnnnnnnnnnnnnnnnnnnnnnnnnnnnnnnnnnnnnnnnnnnnnnnnnnnnnnnnnnnnnnnnnnnnnnnnnnnnnnnnnnnnnnnnnnnnnnnnnnnnnnnnnnnnnnnnnnnnnnnnnnnnnnnnnnnnnnnnnnnnnnnnnnnnnnnnnnnnnnnnnnnnnnnnnnnnnnnnnnnnnnnnnnnnnnnnnnnnnnnnnnnnnnnnnnnnnnnnnnnnnnnnnnnnnnnnnnnnnnnnnnnnnnnnnnnnnnnnnnnnnnnnnnnnnnnnnnnnnnnnnnnnnnnnnnnnnnnnnnnnnnnnnnnnnnnnnnnnnnnnnnnnnnnnnnnnnnnnnnnnnnnnnnnnnnnnnnnnnnnnnnnnnnnnnnnnnnnnnnnnnnnnnnnnnnnnnnnnnnnnnnnnnnnnnnnnnnnnnnnnnnnnnnnnnnnnnnnnnnnnnnnnnnnnnnnnnnnnnnnnnnnnnnnnnnnnnnnnnnnnnnnnnnnnnnnnnnnnnnnnnnnnnnnnnnnnnnnnnnnnnnnnnnnnnnnnnnnnnnnnnnnnnnnnnnnnnnnnnnnnnnnnnnnnnnnnnnnnnnnnnnnnnnnnnnnnnnnnnnnnnnnnnnnnnnnnnnnnnnnnnnnnnnnnnnnnnnnnnnnnnnnnnnnnnnnnnnnnnnnnnnnnnnnnnnnnnnnnnnnnnnnnnnnnnnnnnnnnnnnnnnnnnnnnnnnnnnnnnnnnnnnnnnnnnnnnnnnnnnnnnnnnnnnnnnnnnnnnnnnnnnnnnnnnnnnnnnnnnnnnnnnnnnnnnnnnnnnnnnnnnnnnnnnnnnnnnnnnnnnnnnnnnnnnnnnnnnnnnnnnnnnnnnnnnnnnnnnnnnnnnnnnnnnnnnnnnnnnnnnnnnnnnnnnnnnnnnnnnnnnnnnnnnnnnnnnnnnnnnnnnnnnnnnnnnnnnnnnnnnnnnnnnnnnnnnnnnnnnnnnnnnnnnnnnnnnnnnnnnnnnnnnnnnnnnnnnnnnnnnnnnnnnnnnnnnnnnnnnnnnnnnnnnnnnnnnnnnnnnnnnnnnnnnnnnnnnnnnnnnnnnnnnnnnnnnnnnnnnnnnnnnnnnnnnnnnnnnnnnnnnnnnnnnnnnnnnnnnnnnnnnnnnnnnnnnnnnnnnnnnnnnnnnnnnnnnnnnnnnnnnnnnnnnnnnnnnnnnnnnnnnnnnnnnnnnnnnnnnnnnnnnnnnnnnnnnnnnnnnnnnnnnnnnnnnnnnnnnnnnnnnnnnnnnnnnnnnnnnnnnnnnnnnnnnnnnnnnnnnnnnnnnnnnnnnnnnnnnnnnnnnnnnnnnnnnnnnnnnnnnnnnnnnnnnnnnnnnnnnnnnnnnnnnnnnnnnnnnnnnnnnnnnnnnnnnnnnnnnnnnnnnnnnnnnnnnnnnnnnnnnnnnnnnnnnnnnnnnnnnnnnnnnnnnnnnnnnnnnnnnnnnnnnnnnnnnnnnnnnnnnnnnnnnnnnnnnnnnnnnnnnnnnnnnnnnnnnnnnnnnnnnnnnnnnnnnnnnnnnnnnnnnnnnnnnnnnnnnnnnnnnnnnnnnnnnnnnnnnnnnnnnnnnnnnnnnnnnnnnnnnnnnnnnnnnnnnnnnnnnnnnnnnnnnnnnnnnnnnnnnnnnnnnnnnnnnnnnnnnnnnnnnnnnnnnnnnnnnnnnnnnnnnnnnnnnnnnnnnnnnnnnnnnnnnnnnnnnnnnnnnnnnnnnnnnnnnnnnnnnnnnnnnnnnnnnnnnnnnnnnnnnnnnnnnnnnnnnnnnnnnnnnnnnnnnnnnnnnnnnnnnnnnnnnnnnnnnnnnnnnnnnnnnnnnnnnnnnnnnnnnnnnnnnnnnnnnnnnnnnnnnnnnnnnnnnnnnnnnnnnnnnnnnnnnnnnnnnnnnnnnnnnnnnnnnnnnnnnnnnnnnnnnnnnnnnnnnnnnnnnnnnnnnnnnnnnnnnnnnnnnnnnnnnnnnnnnnnnnnnnnnnnnnnnnnnnnnnnnnnnnnnnnnnnnnnnnnnnnnnnnnnnnnnnnnnnnnnnnnnnnnnnnnnnnnnnnnnnnnnnnnnnnnnnnnnnnnnnnnnnnnnnnnnnnnnnnnnnnnnnnnnnnnnnnnnnnnnnnnnnnnnnnnnnnnnnnnnnnnnnnnnnnnnnnnnnnnnnnnnnnnnnnnnnnnnnnnnnnnnnnnnnnnnnnnnnnnnnnnnnnnnnnnnnnnnnnnnnnnnnnnnnnnnnnnnnnnnnnnnnnnnnnnnnnnnnnnnnnnnnnnnnnnnnnnnnnnnnnnnnnnnnnnnnnnnnnnnnnnnnnnnnnnnnnnnnnnnnnnnnnnnnnnnnnnnnnnnnnnnnnnnnnnnnnnnnnnnnnnnnnnnnnnnnnnnnnnnnnnnnnnnnnnnnnnnnnnnnnnnnnnnnnnnnnnnnnnnnnnnnnnnnnnnnnnnnnnnnnnnnnnnnnnnnnnnnnnnnnnnnnnnnnnnnnnnnnnnnnnnnnnnnnnnnnnnnnnnnnnnnnnnnnnnnnnnnnnnnnnnnnnnnnnnnnnnnnnnnnnnnnnnnnnnnnnnnnnnnnnnnnnnnnnnnnnnnnnnnnnnnnnnnnnnnnnnnnnnnnnnnnnnnnnnnnnnnnnnnnnnnnnnnnnnnnnnnnnnnnnnnnnnnnnnnnnnnnnnnnnnnnnnnnnnnnnnnnnnnnnnnnnnnnnnnnnnnnnnnnnnnnnnnnnnnnnnnnnnnnnnnnnnnnnnnnnnnnnnnnnnnnnnnnnnnnnnnnnnnnnnnnnnnnnnnnnnnnnnnnnnnnnnnnnnnnnnnnnnnnnnnnnnnnnnnnnnnnnnnnnnnnnnnnnnnnnnnnnnnnnnnnnnnnnnnnnnnnnnnnnnnnnnnnnnnnnnnnnnnnnnnnnnnnnnnnnnnnnnnnnnnnnnnnnnnnnnnnnnnnnnnnnnnnnnnnnnnnnnnnnnnnnnnnnnnnnnnnnnnnnnnnnnnnnnnnnnnnnnnnnnnnnnnnnnnnnnnnnnnnnnnnnnnnnnnnnnnnnnnnnnnnnnnnnnnnnnnnnnnnnnnnnnnnnnnnnnnnnnnnnnnnnnnnnnnnnnnnnnnnnnnnnnnnnnnnnnnnnnnnnnnnnnnnnnnnnnnnnnnnnnnnnnnnnnnnnnnnnnnnnnnnnnnnnnnnnnnnnnnnnnnnnnnnnnnnnnnnnnnnnnnnnnnnnnnnnnnnnnnnnnnnnnnnnnnnnnnnnnnnnnnnnnnnnnnnnnnnnnnnnnnnnnnnnnnnnnnnnnnnnnnnnnnnnnnnnnnnnnnnnnnnnnnnnnnnnnnnnnnnnnnnnnnnnnnnnnnnnnnnnnnnnnnnnnnnnnnnnnnnnnnnnnnnnnnnnnnnnnnnnnnnnnnnnnnnnnnnnnnnnnnnnnnnnnnnnnnnnnnnnnnnnnnnnnnnnnnnnnnnnnnnnnnnnnnnnnnnnnnnnnnnnnnnnnnnnnnnnnnnnnnnnnnnnnnnnnnnnnnnnnnnnnnnnnnnnnnnnnnnnnnnnnnnnnnnnnnnnnnnnnnnnnnnnnnnnnnnnnnnnnnnnnnnnnnnnnnnnnnnnnnnnnnnnnnnnnnnnnnnnnnnnnnnnnnnnnnnnnnnnnnnnnnnnnnnnnnnnnnnnnnnnnnnnnnnnnnnnnnnnnnnnnnnnnnnnnnnnnnnnnnnnnnnnnnnnnnnnnnnnnnnnnnnnnnnnnnnnnnnnnnnnnnnnnnnnnnnnnnnnnnnnnnnnnnnnnnnnnnnnnnnnnnnnnnnnnnnnnnnnnnnnnnnnnnnnnnnnnnnnnnnnnnnnnnnnnnnnnnnnnnnnnnnnnnnnnnnnnnnnnnnnnnnnnnnnnnnnnnnnnnnnnnnnnnnnnnnnnnnnnnnnnnnnnnnnnnnnnnnnnnnnnnnnnnnnnnnnnnnnnnnnnnnnnnnnnnnnnnnnnnnnnnnnnnnnnnnnnnnnnnnnnnnnnnnnnnnnnnnnnnnnnnnnnnnnnnnnnnnnnnnnnnnnnnnnnnnnnnnnnnnnnnnnnnnnnnnnnnnnnnnnnnnnnnnnnnnnnnnnnnnnnnnnnnnnnnnnnnnnnnnnnnnnnnnnnnnnnnnnnnnnnnnnnnnnnnnnnnnnnnnnnnnnnnnnnnnnnnnnnnnnnnnnnnnnnnnnnnnnnnnnnnnnnnnnnnnnnnnnnnnnnnnnnnnnnnnnnnnnnnnnnnnnnnnnnnnnnnnnnnnnnnnnnnnnnnnnnnnnnnnnnnnnnnnnnnnnnnnnnnnnnnnnnnnnnnnnnnnnnnnnnnnnnnnnnnnnnnnnnnnnnnnnnnnnnnnnnnnnnnnnnnnnnnnnnnnnnnnnnnnnnnnnnnnnnnnnnnnnnnnnnnnnnnnnnnnnnnnnnnnnnnnnnnnnnnnnnnnnnnnnnnnnnnnnnnnnnnnnnnnnnnnnnnnnnnnnnnnnnnnnnnnnnnnnnnnnnnnnnnnnnnnnnnnnnnnnnnnnnnnnnnnnnnnnnnnnnnnnnnnnnnnnnnnnnnnnnnnnnnnnnnnnnnnnnnnnnnnnnnnnnnnnnnnnnnnnnnnnnnnnnnnnnnnnnnnnnnnnnnnnnnnnnnnnnnnnnnnnnnnnnnnnnnnnnnnnnnnnnnnnnnnnnnnnnnnnnnnnnnnnnnnnnnnnnnnnnnnnnnnnnnnnnnnnnnnnnnnnnnnnnnnnnnnnnnnnnnnnnnnnnnnnnnnnnnnnnnnnnnnnnnnnnnnnnnnnnnnnnnnnnnnnnnnnnnnnnnnnnnnnnnnnnnnnnnnnnnnnnnnnnnnnnnnnnnnnnnnnnnnnnnnnnnnnnnnnnnnnnnnnnnnnnnnnnnnnnnnnnnnnnnnnnnnnnnnnnnnnnnnnnnnnnnnnnnnnnnnnnnnnnnnnnnnnnnnnnnnnnnnnnnnnnnnnnnnnnnnnnnnnnnnnnnnnnnnnnnnnnnnnnnnnnnnnnnnnnnnnnnnnnnnnnnnnnnnnnnnnnnnnnnnnnnnnnnnnnnnnnnnnnnnnnnnnnnnnnnnnnnnnnnnnnnnnnnnnnnnnnnnnnnnnnnnnnnnnnnnnnnnnnnnnnnnnnnnnnnnnnnnnnnnnnnnnnnnnnnnnnnnnnnnnnnnnnnnnnnnnnnnnnnnnnnnnnnnnnnnnnnnnnnnnnnnnnnnnnnnnnnnnnnnnnnnnnnnnnnnnnnnnnnnnnnnnnnnnnnnnnnnnnnnnnnnnnnnnnnnnnnnnnnnnnnnnnnnnnnnnnnnnnnnnnnnnnnnnnnnnnnnnnnnnnnnnnnnnnnnnnnnnnnnnnnnnnnnnnnnnnnnnnnnnnnnnnnnnnnnnnnnnnnnnnnnnnnnnnnnnnnnnnnnnnnnnnnnnnnnnnnnnnnnnnnnnnnnnnnnnnnnnnnnnnnnnnnnnnnnnnnnnnnnnnnnnnnnnnnnnnnnnnnnnnnnnnnnnnnnnnnnnnnnnnnnnnnnnnnnnnnnnnnnnnnnnnnnnnnnnnnnnnnnnnnnnnnnnnnnnnnnnnnnnnnnnnnnnnnnnnnnnnnnnnnnnnnnnnnnnnnnnnnnnnnnnnnnnnnnnnnnnnnnnnnnnnnnnnnnnnnnnnnnnnnnnnnnnnnnnnnnnnnnnnnnnnnnnnnnnnnnnnnnnnnnnnnnnnnnnnnnnnnnnnnnnnnnnnnnnnnnnnnnnnnnnnnnnnnnnnnnnnnnnnnnnnnnnnnnnnnnnnnnnnnnnnnnnnnnnnnnnnnnnnnnnnnnnnnnnnnnnnnnnnnnnnnnnnnnnnnnnnnnnnnnnnnnnnnnnnnnnnnnnnnnnnnnnnnnnnnnnnnnnnnnnnnnnnnnnnnnnnnnnnnnnnnnnnnnnnnnnnnnnnnnnnnnnnnnnnnnnnnnnnnnnnnnnnnnnnnnnnnnnnnnnnnnnnnnnnnnnnnnnnnnnnnnnnnnnnnnnnnnnnnnnnnnnnnnnnnnnnnnnnnnnnnnnnnnnnnnnnnnnnnnnnnnnnnnnnnnnnnnnnnnnnnnnnnnnnnnnnnnnnnnnnnnnnnnnnnnnnnnnnnnnnnnnnnnnnnnnnnnnnnnnnnnnnnnnnnnnnnnnnnnnnnnnnnnnnnnnnnnnnnnnnnnnnnnnnnnnnnnnnnnnnnnnnnnnnnnnnnnnnnnnnnnnnnnnnnnnnnnnnnnnnnnnnnnnnnnnnnnnnnnnnnnnnnnnnnnnnnnnnnnnnnnnnnnnnnnnnnnnnnnnnnnnnnnnnnnnnnnnnnnnnnnnnnnnnnnnnnnnnnnnnnnnnnnnnnnnnnnnnnnnnnnnnnnnnnnnnnnnnnnnnnnnnnnnnnnnnnnnnnnnnnnnnnnnnnnnnnnnnnnnnnnnnnnnnnnnnnnnnnnnnnnnnnnnnnnnnnnnnnnnnnnnnnnnnnnnnnnnnnnnnnnnnnnnnnnnnnnnnnnnnnnnnnnnnnnnnnnnnnnnnnnnnnnnnnnnnnnnnnnnnnnnnnnnnnnnnnnnnnnnnnnnnnnnnnnnnnnnnnnnnnnnnnnnnnnnnnnnnnnnnnnnnnnnnnnnnnnnnnnnnnnnnnnnnnnnnnnnnnnnnnnnnnnnnnnnnnnnnnnnnnnnnnnnnnnnnnnnnnnnnnnnnnnnnnnnnnnnnnnnnnnnnnnnnnnnnnnnnnnnnnnnnnnnnnnnnnnnnnnnnnnnnnnnnnnnnnnnnnnnnnnnnnnnnnnnnnnnnnnnnnnnnnnnnnnnnnnnnnnnnnnnnnnnnnnnnnnnnnnnnnnnnnnnnnnnnnnnnnnnnnnnnnnnnnnnnnnnnnnnnnnnnnnnnnnnnnnnnnnnnnnnnnnnnnnnnnnnnnnnnnnnnnnnnnnnnnnnnnnnnnnnnnnnnnnnnnnnnnnnnnnnnnnnnnnnnnnnnnnnnnnnnnnnnnnnnnnnnnnnnnnnnnnnnnnnnnnnnnnnnnnnnnnnnnnnnnnnnnnnnnnnnnnnnnnnnnnnnnnnnnnnnnnnnnnnnnnnnnnnnnnnnnnnnnnnnnnnnnnnnnnnnnnnnnnnnnnnnnnnnnnnnnnnnnnnnnnnnnnnnnnnnnnnnnnnnnnnnnnnnnnnnnnnnnnnnnnnnnnnnnnnnnnnnnnnnnnnnnnnnnnnnnnnnnnnnnnnnnnnnnnnnnnnnnnnnnnnnnnnnnnnnnnnnnnnnnnnnnnnnnnnnnnnnnnnnnnnnnnnnnnnnnnnnnnnnnnnnnnnnnnnnnnnnnnnnnnnnnnnnnnnnnnnnnnnnnnnnnnnnnnnnnnnnnnnnnnnnnnnnnnnnnnnnnnnnnnnnnnnnnnnnnnnnnnnnnnnnnnnnnnnnnnnnnnnnnnnnnnnnnnnnnnnnnnnnnnnnnnnnnnnnnnnnnnnnnnnnnnnnnnnnnnnnnnnnnnnnnnnnnnnnnnnnnnnnnnnnnnnnnnnnnnnnnnnnnnnnnnnnnnnnnnnnnnnnnnnnnnnnnnnnnnnnnnnnnnnnnnnnnnnnnnnnnnnnnnnnnnnnnnnnnnnnnnnnnnnnnnnnnnnnnnnnnnnnnnnnnnnnnnnnnnnnnnnnnnnnnnnnnnnnnnnnnnnnnnnnnnnnnnnnnnnnnnnnnnnnnnnnnnnnnnnnnnnnnnnnnnnnnnnnnnnnnnnnnnnnnnnnnnnnnnnnnnnnnnnnnnnnnnnnnnnnnnnnnnnnnnnnnnnnnnnnnnnnnnnnnnnnnnnnnnnnnnnnnnnnnnnnnnnnnnnnnnnnnnnnnnnnnnnnnnnnnnnnnnnnnnnnnnnnnnnnnnnnnnnnnnnnnnnnnnnnnnnnnnnnnnnnnnnnnnnnnnnnnnnnnnnnnnnnnnnnnnnnnnnnnnnnnnnnnnnnnnnnnnnnnnnnnnnnnnnnnnnnnnnnnnnnnnnnnnnnnnnnnnnnnnnnnnnnnnnnnnnnnnnnnnnnnnnnnnnnnnnnnnnnnnnnnnnnnnnnnnnnnnnnnnnnnnnnnnnnnnnnnnnnnnnnnnnnnnnnnnnnnnnnnnnnnnnnnnnnnnnnnnnnnnnnnnnnnnnnnnnnnnnnnnnnnnnnnnnnnnnnnnnnnnnnnnnnnnnnnnnnnnnnnnnnnnnnnnnnnnnnnnnnnnnnnnnnnnnnnnnnnnnnnnnnnnnnnnnnnnnnnnnnnnnnnnnnnnnnnnnnnnnnnnnnnnnnnnnnnnnnnnnnnnnnnnnnnnnnnnnnnnnnnnnnnnnnnnnnnnnnnnnnnnnnnnnnnnnnnnnnnnnnnnnnnnnnnnnnnnnnnnnnnnnnnnnnnnnnnnnnnnnnnnnnnnnnnnnnnnnnnnnnnnnnnnnnnnnnnnnnnnnnnnnnnnnnnnnnnnnnnnnnnnnnnnnnnnnnnnnnnnnnnnnnnnnnnnnnnnnnnnnnnnnnnnnnnnnnnnnnnnnnnnnnnnnnnnnnnnnnnnnnnnnnnnnnnnnnnnnnnnnnnnnnnnnnnnnnnnnnnnnnnnnnnnnnnnnnnnnnnnnnnnnnnnnnnnnnnnnnnnnnnnnnnnnnnnnnnnnnnnnnnnnnnnnnnnnnnnnnnnnnnnnnnnnnnnnnnnnnnnnnnnnggacttctgcagcgtgcgggtggtgcccagaccagtgcgacgcagttccacaccacgctgcttgcgacgagccaggcgctctacaagcaggctggggggcatgtggccgcgctgcccggattgggccctggcatcgcccatcgcctactgagcgagatggagtggcttagccagtgcacatgggccacgacttcggcacggggccgcaattggcgcgacccgccaaagggtcatcgggttgtcgagacgctgtgcgcgcggggagcgaaggggcacgcaatccgatcgggcctttgcgccctcagcgtgacggccgaacgcgctttggagaaggccttccagaatctgatgcgagggctcgccaccgtcggccacatcgacggcgaatcgcaagcacagatactgacggaatggagagatgaggccttggaagttctccgcgaccacgttgggcgcgtcgtcgacgcgaccattgccggctcgccgctccgccggcgcgaggcggctcaacgggcgcagcaagcgttgcgtgaggtgatgaggaacctggcgcagggcgatcaggaggcgcgaacccctgacgctgctgacaagcccaaacgctcccgccggaagcgaggcacagcatgactccgactgagcagttcattcgacagcttggggcgctccaggccggcgagcgctcccgactgcgcagcctcgccggtcaaccgctccaccagacggtgccaggtttcgacctctttacggccctctggcggcccgtgcgccaagggggcgggaggcagccgagctggctggtcgcgaagctgttcggggcgtttccgttgccgcctgtccggggtgagtccctgcccgcgatcgtcggcacatgtgagcccggggacgaggacgccgggaagcgctggcgcgaccgattcgatgcgctgctgcaaacgcccctgtcgcagttggagccgcacctgggctgggcgctgtccgtggcggcgcatgctgtggctgccggccgggccaaaggcatggactgggtgcggctgctgcatgacctatcgcgctgggaacgcgacgaggagcagggccggagacgtgacgtgcgcgacatctgggccaaagagtatctcaaggctgcgaagcagcccggaaggagctgaccatgctgatcgagatccatatgatccagaatcacagtccgtcgaacctgaatcgggacgaccagggcgcccccaagacctgcctcttcggcggcgtcccacgtgcccgcatctccagccagtgcctgaaacggtcgattcgtcgcagccctgcgttccaggcagtgctcgagagagagggcggggtgcgtacgcgccgactcatcaccattctggccgaggaggtccatggcggctctgatccgccagaggagctggtggtgctcatcgccaaggcgttcgagaagggcggggtgaaacgggtaaagaggcagacggctcaagagccggacaacacgaacatcctgttgttcgtcccccggtcatccatccccaggatggccgatgcggtggcggcggagagcgggaagaagaaacccaatcacgaggcgcttgcgcaggccatcacggacatccttggcgagtccgcctcggtccccgacatcgccctgtcgggacggatgactgagctcgaccgggaaggcctcttcgcgaagctgaacctgcacgtggacgcgtcgctctccgcggcccacgcgatctcgacgcaccgggtggtcaatgagacggactacttcaccgcggtggacgaccggggcaagcccggcggtggcgcagcccacccggacgaggccatgttcaactccgcgtgcttctacaagtatttctctctggactgggaccagcttgtgcacaacctcgccgggtcggagccggatccggaaggggacgctcacaagaagtggcaggaggaactgaagcctgaagcggagcgcctcgccgccgcgacgctggggcatttcctgcgcgccgcggccgtgaccacgcccaccggcaagcagaagagcagcgcggcctacaaccgaccggatggcatcctcgtcgaggtcaagaagaaccggaagccccccatgagctacgccaacgcattcgccgaaccggcccgcaggatcggcgatcccccggatgacgcgccggacgctctgagccttgttgggcgcagcatcgcgcaactcggcgatcacgtctacagcctgcgccgggccttcgagatcggctccaccttgctctggtatagcccggagctgtggcgctacccactgcagggctgggaacgcgaggccgacggacagaagaagaaggtgaaggggaaagacaaagccgtgccgatcgcggaccagaccttcgacgctctcggaggggagggcaaggccgcggggctggtggaggccgtgctgagagaagtcggcttccgttggtcgaaagtcaaggacgccgggcggggcgaggcggaggtgagttgacgtgggcctatctacgccgaacacgctcttcctgcggctggagggccccctccagtcgtggggcgacaactcgaagttcgtcatccgccggacctacgaggcgcccagcaagtccggcgtgatggggctgatctgctgcgccatgggcgtgccccggcaggcggccccctgccggctgcgggagctcaacgagcttcgtatgggtgtgcgcatagatcgtcgcggcacccgttggtgggactaccacacggtgggggcgaagatcggcgtccttagggcggacggcgaaggtatcaagcgtaccggcggcgcgaaggacgatcccattgagaccctcatcacacggcgggagtacctctgcgacgcgagcttcctggtagccctccagggcgatccggaggtgatcggccacattcgccacggcttgacgagtccggtatggccggttttcctcggccgcaaatcgtgtccgccggccacgccggtcctcgcaggggaggccccttgcgctggcctgttggccgcgttgcgacacaagtgctggcggccacgctacaacagcgacgagcgagcgcgagagaagcgtgtggctttgccttgcctaatcgaatggcgagcgtcgcgagagggagcgactgccccggatgacgcagaggtctggtatgacacgccgaaatccttcgccccgccggtccacgaggcacgccttttacagcgcgatgaagtcacagtgacggtgggttgtgccctgcagcactccacgcccacccctcgctggccccggcccagctatgaggcgcagcgccagcagcgcctctgcaaggacaagggcctgtgcgtgttctgcaagtcgtcgcagagggtggaagcccaccacgtaacctaccgccgggccgggggcgacgagacggtggacgacctgcgcttgctgtgccacctctgccacgacgccgtgaccatgatcgagtacggggagaacatgggcctggaccgcatcaacccggaggacccgcggtggcgcgaccggatcatccagaagcgggacgagatcgtggcgtttcgttcgctcggcaccgagcgccgacacccgagggctgaggaggcgaactaagcatgtatcgctcctgcttgctcatcaacgtgggcacgaaccccgaccggccacgcccggcacgctggtggctgcggaaccgctaccgggtgcatcagcggctgtgcatggggttcccgtccagggaacgtacagaaactgacgcgcagtttctgaagccatgggatccgcgtgacttccctgaacagcgacacttggccgacaaacccgggggagaagtggcaccggacgtgcttcggcaagtccacgctcagcgcgacgaacgcagtgggttcctgttccgcatcgacccgcggccgggccgctccccggtgatcctcgtgcagtcggcggggaagccggactgggactatgcgttccacaacgcgcggcacatgctccggtgtttcgatgttcgctcattctcaccggcgtatgctggcgccgacatgctgcggttccggctgcttgcgaatcccacgaagcgcctccgggcggactccatcggccctgatgggggaccgattgagaagcaatgggtcggcaagcgcgtgccggtggcgaccgagatgctggaagagtggctgagccgtcggggcgagcgcgggggctttcgcgtgcagggtcttacgaccgttgagcccgcatgggcctacatgaacaagacgcgcgaccgcggtaagggccagcggctcagaagcgtgcgctacgagggggtgctcgaagtcgccgactccgctcgcttcgaagaagcggtggtggaaggcatcggcccggcgaaggccttcggcttcgggctgctgtcggtggcgccgctgcgctgacgggcggcgactgcactgtaccttgacaactgaacgggtctcctggggcgtgctgttgatccatggggcgcagacggagcagcggttccgcattcgggcgtggggagacacttcgcgtgagccggtggacttcgagggcttgactctggtgcggcgcggggccgcgggaaagagccacgaggagcattaccggaagcgcgggcgggaggccgaatcgacggactgaggggcttgggtgtacaagtttggcggccttttgtagtgtattccccacgcatgtgggggtgaaccgttggctgggcggccgggctcgggcgggccggggtattccccacgcatgtgggggtgaaccgcgggagtcgcttgagggccggctgaggagtgtgtattccccacgcatgtgggggtgaaccgttggcatggcgggccttggagcgcgcacataagtattccccacgcatgtgggggtgaaccggagagcttcatgacaggacccaacggcgaacacgtattccccacgcatgtgggggtgaaccgccgtacggcgcggcgacccggcgcgtgcggtcgtattccccacgcatgtgggggtgaaccgtgcgcctcctgcgtggctgtgtctagcggtatggtattccccacgcatgtgagggtgaaccgcgctgttcccggccgcccgacggcatgaaactcgccgtcgagaacacgcaggagctgcggttcaggaacggcgcgagcatcaaggcggaggcggcgagccagaatccggggcggtcgtacagcgcgagctgcatcgttctggacgagctcgcgtattccccacgcatgtgggggtgaaccagcgacccaacacccgcaaaaagcaccactcgccgtattccccacgcatgtgggggtgaaccgtccacgtggcaggagattcaggtgcgctttgtgtattccccacgcatgtgggggtgaaccggcggtgttccatctcgacgacgccacctacaagtattccccacgcatgtgggggtgaaccggaggccggttgggagatcgagtctatcgatccgtattccccacgcatgtgggggtgaaccgctcccctcacggactggccacccaggaacttccgtattccccacgcatgtgggggtgaaccgttcgccgtcctcatgcgcggcgagcaggccgacgtattccccacgcatgtgggggtgaaccggaatcccggaagatccagaggtttggttacaagtattccccacgcatgtgggggtgaaccgcggctgacgtcccccgtcttctacgtacgccggtattccccacgcatgtgggggtgaaccggaccgacggcggcgcatccgcgtcgccgactggtattccccacgcatgtgggggtgaaccgaagattgttacattcgcatctatcggcggaatgtattccccacgcatgtgggggtgaaccgcctaacatgcagcaaatgagcaagcgcgacgagtattccccacgcatgtgggggtgaaccgaggaccgcgttcaggtgctcaccgagatgttggtattccccacgcatgtgggggtgaaccggtgccgaagggcgagacggtgttcgtgtgttcgtattccccacgcatgtgggggtgaaccgatcgtcggcgagaaagctgcgttgcgtcggctgtattccccacgcatgtgggggtgaaccgaatgtatcgcggtggctcagtgccatcaagcggtattccccacgcatgtgggggtgaaccgacggagtttcgagcgtttgtccaggagcttgagtattccccacgcatgtgggggtgaaccgctccacagcatgcacttgttgagcgggatgtcgtattccccacgcatgtgggggtgaaccgcggaactcgaccagagggttcttcgcaacggcgtattccccacgcatgtgggggtgaaccgccgaaggggaagttcctcgaacagctctattcgtattccccacgcatgtgggggaccttgagggagggaactgacaccaatgcaataccgacgactcggacgcagcggggtgcagctctcggagatcggactcgggagctggctgacgtatgggaacgccgttgagttggaggaggcgcggaagtgcttccataaggcgttcgacctgggcatcaacttcttcgacacggccaacaactacgccgagggcgatgccgagcgctgcctgtccaagatcctgcccgacttcccccgcgacgagtacgtgctggcgaccaagtgctacttccccgtgggcgagaagccgaaccagtcgggcctgtcccgcaagcacatcagggagcagtgcgaccggtcgctgcagcggctcggggtggactacatcgatctgtaccagtgccatcggtacgacgagaacacccccctcgatgaaacgctgcgggcgctcgatgacctggtgagggcggggaaggtgctgtacgtgggcgggagcgagtggccggcggatcggatcgtggaggcgcatcggatcgcggagcggctcgggctggaccggatggtatcgaaccagccacggtacaacatgctcgcccgccagatcgaacgcaccgtcatccccatgtgcgagcatctgggggttgggcaggtggtgtacagctcgctgggtcagggggtgctgacggggaagtacagtgggggcgagatcccggcggacagccgcgccgccgacgaccggcagaatcagttcatcaagggcgtgttgacgcctcagaacatcgagcgggccgacaaactggcgccggtggccaaggaggccggcgtatcgccggcgcaactggccatagcgtggtgcctgcggcaggcgaacgtcaccagcgccatcgtcggcgccagccggccggagcaagtggaggagaacgccgcggcaagcggcgtggagctctccgacgacgtgctcaagaagatcgacaggatcgtgcggtaacggcggacgaggtgggggagatgctggcgcgctgagaggcggcgaaacgaaggcaatgtgctctctcacggcctgttgtgctttccattagtcctacaaccgtgcttgtcgagccatgtcattctcagcggagtgcaacgcagcgaagaatctcgattttgacgcaagaaggggtgtcgcacgccgagattcttcgtcgctttgctcctcagaatgacaagcacggttgtagtattaggccccgccggagcgaaatccggaattgacgcagcgcgggtgtgcggcgtgcttattctttggagcctatcccaaaacccacccgcccacaaaccggtcattctgaacgaagtgaagaatctcgctccagtggacagtacgagatgcttcgctccgctcagcatgacaggtcaaggagttttgggataggctctcaactgcgaggcatggtgaaatgacagaagtgaccctgaatatcgaaaagcccgtctcgattgccctcgtcgccatcggcggctacggcaacacgtacctgcgcgctctgctccggcgggcgccgcgggattcttttcgcatcgtcgcggggatagatccatcgcccgagaggtgtagatacctcgacgaactgcgggcaatggacgtggcctttcacgcgtcgcccgaggaattctacgccacgggcactgccgaccttgccatcatatcaagccccatccacttccactgcgaccagacgtgtctggctctggccaacggcagcaacgtcctttgtgagaagccactgggggccacaatccaggaggcccggcgcatgatcgaggcgcgggacgaggcggggaagtgggtcggcataggctaccagtggtcgtacacaccgtctatccaggagctgaaaaaggacataatgaacggctcgttcggcaagccgagacggctgaagacgctgatcctggggccccgcccagccagctactacggtcgggcaaactgggcgggggcgcagcgtgacgcatcgggcaagtggatcctggacagtccggttaacaacgcgacggcgcactacctgcacaattgcttctacgtcctgggcgacacacgcgaggccagcgccggcgtaagtgacgtggtggcggagctgtaccgcgccaacgacatccagaactacgacacggccgccgcacgcgctcacacccgcgagggtgtggagatcctctacttcgccgcacacgcggtgaaggaccggatcggcccgatgttcagctatgagttcgagaaggccacggtgacgctggaagaccagaatgccgacgtcatagcggcgtttgccgacggctccacgaagaactacggctctccacaggccgattacgaccagaagctgtgggacgcgatggcggccgcgggcggcgaagacgctaaacccatcgcctgcccgccggaggctgccagctcccagacgctgtgtatgaacgggatacaggagtcagtgcctgatatcgttgagttcccgggggctctcatcaacaaggatgagcaggatggcgaccgcctgacctgggtcacgggccttcgagagactctggaagagtgctataacgagagcaaactcccgagcgagttgggcgcatcttggagcaaggcggggaaaacaatcgacctgaccgactaccacttctatcccggcgggtcgaaccggtagccattgcgggcaaggtcggccgtgccccaccgggccatggcgaactgcctcgaagatttggtcgtgtgcctttctgtaggcgagtacctgtggctcgccacagccccgtctcagcgctcccacgggctgtgcgccagcccagacatcttcatcgtttccgggcggcgcaacgcggcgtggcgaactgcctcgatcttctcatattgccagaacctgctgaaaggagaaaggcccatggtgcactacatcgtgcacgagaagaaagacaccgtcggcgtggcggtcgttgatgtgaagaggagcgatgatttgactggttggaacatggaggaggactccaccctccacatgagagccgagcagaacgttcccctcggacacaagatcgctttgaccgccatcggcaacggcgaccaggtgatcaagtacggcgaggcgatcggtaacgccacgaaggccatcaacaagggccagcacgtgcacactcagaatctcaagaccgcgaggtggtagatgatggccgaactgaagctcgacaaagccttcatgggataccgccgcgagaacggccgcgtgggcgtccgcaatcacgtagtcatcatgccgctcgacgacatttcgaacgcggcggcccaggcggtcgcctcgcatattcagggaacgatggcgatcccgcacgcgtatgggcgtctacagttcggtgaggacctcgaactgttcttccggacgatcatcggcacgtgcgccaacccgaacgcagccgcgtgcgtggtgatcggcatcgaagacgaatggaccaacaaggtcgtcgaaggcgtcaaggctctgggtcgcagcaaggtcgccggcttctcgatcgagctcaaaggccagatggaatgcgtcaggcaggcgtcctggcaggcctgggagtacaagctctgggcgactgagcagaagcgcgagaaatgcccagtggcggacctttgggtctcgaccaagtgcggcgagtccgacaccacctcgggtctggcctcgtgccccacggtcggcagcgtgttcgatcgcctcgacgccaatggcaatacgctgagcttcggcgagacgaccgagattaccggcgccgaacgtatctgtgccgcccgcgccaagagcaagagcgtg

SEQ ID NO: 1034 - DNA, 106359 bp, Artificial Sequence
  Synthetic Oligonucleotide
  misc_feature (1)..(96189): n is a, c, g, or t
nnnnnnnnnnnnnnnnnnnnnnnnnnnnnnnnnnnnnnnnnnnnnnnnnnnnnnnnnnnnnnnnnnnnnnnnnnnnnnnnnnnnnnnnnnnnnnnnnnnnnnnnnnnnnnnnnnnnnnnnnnnnnnnnnnnnnnnnnnnnnnnnnnnnnnnnnnnnnnnnnnnnnnnnnnnnnnnnnnnnnnnnnnnnnnnnnnnnnnnnnnnnnnnnnnnnnnnnnnnnnnnnnnnnnnnnnnnnnnnnnnnnnnnnnnnnnnnnnnnnnnnnnnnnnnnnnnnnnnnnnnnnnnnnnnnnnnnnnnnnnnnnnnnnnnnnnnnnnnnnnnnnnnnnnnnnnnnnnnnnnnnnnnnnnnnnnnnnnnnnnnnnnnnnnnnnnnnnnnnnnnnnnnnnnnnnnnnnnnnnnnnnnnnnnnnnnnnnnnnnnnnnnnnnnnnnnnnnnnnnnnnnnnnnnnnnnnnnnnnnnnnnnnnnnnnnnnnnnnnnnnnnnnnnnnnnnnnnnnnnnnnnnnnnnnnnnnnnnnnnnnnnnnnnnnnnnnnnnnnnnnnnnnnnnnnnnnnnnnnnnnnnnnnnnnnnnnnnnnnnnnnnnnnnnnnnnnnnnnnnnnnnnnnnnnnnnnnnnnnnnnnnnnnnnnnnnnnnnnnnnnnnnnnnnnnnnnnnnnnnnnnnnnnnnnnnnnnnnnnnnnnnnnnnnnnnnnnnnnnnnnnnnnnnnnnnnnnnnnnnnnnnnnnnnnnnnnnnnnnnnnnnnnnnnnnnnnnnnnnnnnnnnnnnnnnnnnnnnnnnnnnnnnnnnnnnnnnnnnnnnnnnnnnnnnnnnnnnnnnnnnnnnnnnnnnnnnnnnnnnnnnnnnnnnnnnnnnnnnnnnnnnnnnnnnnnnnnnnnnnnnnnnnnnnnnnnnnnnnnnnnnnnnnnnnnnnnnnnnnnnnnnnnnnnnnnnnnnnnnnnnnnnnnnnnnnnnnnnnnnnnnnnnnnnnnnnnnnnnnnnnnnnnnnnnnnnnnnnnnnnnnnnnnnnnnnnnnnnnnnnnnnnnnnnnnnnnnnnnnnnnnnnnnnnnnnnnnnnnnnnnnnnnnnnnnnnnnnnnnnnnnnnnnnnnnnnnnnnnnnnnnnnnnnnnnnnnnnnnnnnnnnnnnnnnnnnnnnnnnnnnnnnnnnnnnnnnnnnnnnnnnnnnnnnnnnnnnnnnnnnnnnnnnnnnnnnnnnnnnnnnnnnnnnnnnnnnnnnnnnnnnnnnnnnnnnnnnnnnnnnnnnnnnnnnnnnnnnnnnnnnnnnnnnnnnnnnnnnnnnnnnnnnnnnnnnnnnnnnnnnnnnnnnnnnnnnnnnnnnnnnnnnnnnnnnnnnnnnnnnnnnnnnnnnnnnnnnnnnnnnnnnnnnnnnnnnnnnnnnnnnnnnnnnnnnnnnnnnnnnnnnnnnnnnnnnnnnnnnnnnnnnnnnnnnnnnnnnnnnnnnnnnnnnnnnnnnnnnnnnnnnnnnnnnnnnnnnnnnnnnnnnnnnnnnnnnnnnnnnnnnnnnnnnnnnnnnnnnnnnnnnnnnnnnnnnnnnnnnnnnnnnnnnnnnnnnnnnnnnnnnnnnnnnnnnnnnnnnnnnnnnnnnnnnnnnnnnnnnnnnnnnnnnnnnnnnnnnnnnnnnnnnnnnnnnnnnnnnnnnnnnnnnnnnnnnnnnnnnnnnnnnnnnnnnnnnnnnnnnnnnnnnnnnnnnnnnnnnnnnnnnnnnnnnnnnnnnnnnnnnnnnnnnnnnnnnnnnnnnnnnnnnnnnnnnnnnnnnnnnnnnnnnnnnnnnnnnnnnnnnnnnnnnnnnnnnnnnnnnnnnnnnnnnnnnnnnnnnnnnnnnnnnnnnnnnnnnnnnnnnnnnnnnnnnnnnnnnnnnnnnnnnnnnnnnnnnnnnnnnnnnnnnnnnnnnnnnnnnnnnnnnnnnnnnnnnnnnnnnnnnnnnnnnnnnnnnnnnnnnnnnnnnnnnnnnnnnnnnnnnnnnnnnnnnnnnnnnnnnnnnnnnnnnnnnnnnnnnnnnnnnnnnnnnnnnnnnnnnnnnnnnnnnnnnnnnnnnnnnnnnnnnnnnnnnnnnnnnnnnnnnnnnnnnnnnnnnnnnnnnnnnnnnnnnnnnnnnnnnnnnnnnnnnnnnnnnnnnnnnnnnnnnnnnnnnnnnnnnnnnnnnnnnnnnnnnnnnnnnnnnnnnnnnnnnnnnnnnnnnnnnnnnnnnnnnnnnnnnnnnnnnnnnnnnnnnnnnnnnnnnnnnnnnnnnnnnnnnnnnnnnnnnnnnnnnnnnnnnnnnnnnnnnnnnnnnnnnnnnnnnnnnnnnnnnnnnnnnnnnnnnnnnnnnnnnnnnnnnnnnnnnnnnnnnnnnnnnnnnnnnnnnnnnnnnnnnnnnnnnnnnnnnnnnnnnnnnnnnnnnnnnnnnnnnnnnnnnnnnnnnnnnnnnnnnnnnnnnnnnnnnnnnnnnnnnnnnnnnnnnnnnnnnnnnnnnnnnnnnnnnnnnnnnnnnnnnnnnnnnnnnnnnnnnnnnnnnnnnnnnnnnnnnnnnnnnnnnnnnnnnnnnnnnnnnnnnnnnnnnnnnnnnnnnnnnnnnnnnnnnnnnnnnnnnnnnnnnnnnnnnnnnnnnnnnnnnnnnnnnnnnnnnnnnnnnnnnnnnnnnnnnnnnnnnnnnnnnnnnnnnnnnnnnnnnnnnnnnnnnnnnnnnnnnnnnnnnnnnnnnnnnnnnnnnnnnnnnnnnnnnnnnnnnnnnnnnnnnnnnnnnnnnnnnnnnnnnnnnnnnnnnnnnnnnnnnnnnnnnnnnnnnnnnnnnnnnnnnnnnnnnnnnnnnnnnnnnnnnnnnnnnnnnnnnnnnnnnnnnnnnnnnnnnnnnnnnnnnnnnnnnnnnnnnnnnnnnnnnnnnnnnnnnnnnnnnnnnnnnnnnnnnnnnnnnnnnnnnnnnnnnnnnnnnnnnnnnnnnnnnnnnnnnnnnnnnnnnnnnnnnnnnnnnnnnnnnnnnnnnnnnnnnnnnnnnnnnnnnnnnnnnnnnnnnnnnnnnnnnnnnnnnnnnnnnnnnnnnnnnnnnnnnnnnnnnnnnnnnnnnnnnnnnnnnnnnnnnnnnnnnnnnnnnnnnnnnnnnnnnnnnnnnnnnnnnnnnnnnnnnnnnnnnnnnnnnnnnnnnnnnnnnnnnnnnnnnnnnnnnnnnnnnnnnnnnnnnnnnnnnnnnnnnnnnnnnnnnnnnnnnnnnnnnnnnnnnnnnnnnnnnnnnnnnnnnnnnnnnnnnnnnnnnnnnnnnnnnnnnnnnnnnnnnnnnnnnnnnnnnnnnnnnnnnnnnnnnnnnnnnnnnnnnnnnnnnnnnnnnnnnnnnnnnnnnnnnnnnnnnnnnnnnnnnnnnnnnnnnnnnnnnnnnnnnnnnnnnnnnnnnnnnnnnnnnnnnnnnnnnnnnnnnnnnnnnnnnnnnnnnnnnnnnnnnnnnnnnnnnnnnnnnnnnnnnnnnnnnnnnnnnnnnnnnnnnnnnnnnnnnnnnnnnnnnnnnnnnnnnnnnnnnnnnnnnnnnnnnnnnnnnnnnnnnnnnnnnnnnnnnnnnnnnnnnnnnnnnnnnnnnnnnnnnnnnnnnnnnnnnnnnnnnnnnnnnnnnnnnnnnnnnnnnnnnnnnnnnnnnnnnnnnnnnnnnnnnnnnnnnnnnnnnnnnnnnnnnnnnnnnnnnnnnnnnnnnnnnnnnnnnnnnnnnnnnnnnnnnnnnnnnnnnnnnnnnnnnnnnnnnnnnnnnnnnnnnnnnnnnnnnnnnnnnnnnnnnnnnnnnnnnnnnnnnnnnnnnnnnnnnnnnnnnnnnnnnnnnnnnnnnnnnnnnnnnnnnnnnnnnnnnnnnnnnnnnnnnnnnnnnnnnnnnnnnnnnnnnnnnnnnnnnnnnnnnnnnnnnnnnnnnnnnnnnnnnnnnnnnnnnnnnnnnnnnnnnnnnnnnnnnnnnnnnnnnnnnnnnnnnnnnnnnnnnnnnnnnnnnnnnnnnnnnnnnnnnnnnnnnnnnnnnnnnnnnnnnnnnnnnnnnnnnnnnnnnnnnnnnnnnnnnnnnnnnnnnnnnnnnnnnnnnnnnnnnnnnnnnnnnnnnnnnnnnnnnnnnnnnnnnnnnnnnnnnnnnnnnnnnnnnnnnnnnnnnnnnnnnnnnnnnnnnnnnnnnnnnnnnnnnnnnnnnnnnnnnnnnnnnnnnnnnnnnnnnnnnnnnnnnnnnnnnnnnnnnnnnnnnnnnnnnnnnnnnnnnnnnnnnnnnnnnnnnnnnnnnnnnnnnnnnnnnnnnnnnnnnnnnnnnnnnnnnnnnnnnnnnnnnnnnnnnnnnnnnnnnnnnnnnnnnnnnnnnnnnnnnnnnnnnnnnnnnnnnnnnnnnnnnnnnnnnnnnnnnnnnnnnnnnnnnnnnnnnnnnnnnnnnnnnnnnnnnnnnnnnnnnnnnnnnnnnnnnnnnnnnnnnnnnnnnnnnnnnnnnnnnnnnnnnnnnnnnnnnnnnnnnnnnnnnnnnnnnnnnnnnnnnnnnnnnnnnnnnnnnnnnnnnnnnnnnnnnnnnnnnnnnnnnnnnnnnnnnnnnnnnnnnnnnnnnnnnnnnnnnnnnnnnnnnnnnnnnnnnnnnnnnnnnnnnnnnnnnnnnnnnnnnnnnnnnnnnnnnnnnnnnnnnnnnnnnnnnnnnnnnnnnnnnnnnnnnnnnnnnnnnnnnnnnnnnnnnnnnnnnnnnnnnnnnnnnnnnnnnnnnnnnnnnnnnnnnnnnnnnnnnnnnnnnnnnnnnnnnnnnnnnnnnnnnnnnnnnnnnnnnnnnnnnnnnnnnnnnnnnnnnnnnnnnnnnnnnnnnnnnnnnnnnnnnnnnnnnnnnnnnnnnnnnnnnnnnnnnnnnnnnnnnnnnnnnnnnnnnnnnnnnnnnnnnnnnnnnnnnnnnnnnnnnnnnnnnnnnnnnnnnnnnnnnnnnnnnnnnnnnnnnnnnnnnnnnnnnnnnnnnnnnnnnnnnnnnnnnnnnnnnnnnnnnnnnnnnnnnnnnnnnnnnnnnnnnnnnnnnnnnnnnnnnnnnnnnnnnnnnnnnnnnnnnnnnnnnnnnnnnnnnnnnnnnnnnnnnnnnnnnnnnnnnnnnnnnnnnnnnnnnnnnnnnnnnnnnnnnnnnnnnnnnnnnnnnnnnnnnnnnnnnnnnnnnnnnnnnnnnnnnnnnnnnnnnnnnnnnnnnnnnnnnnnnnnnnnnnnnnnnnnnnnnnnnnnnnnnnnnnnnnnnnnnnnnnnnnnnnnnnnnnnnnnnnnnnnnnnnnnnnnnnnnnnnnnnnnnnnnnnnnnnnnnnnnnnnnnnnnnnnnnnnnnnnnnnnnnnnnnnnnnnnnnnnnnnnnnnnnnnnnnnnnnnnnnnnnnnnnnnnnnnnnnnnnnnnnnnnnnnnnnnnnnnnnnnnnnnnnnnnnnnnnnnnnnnnnnnnnnnnnnnnnnnnnnnnnnnnnnnnnnnnnnnnnnnnnnnnnnnnnnnnnnnnnnnnnnnnnnnnnnnnnnnnnnnnnnnnnnnnnnnnnnnnnnnnnnnnnnnnnnnnnnnnnnnnnnnnnnnnnnnnnnnnnnnnnnnnnnnnnnnnnnnnnnnnnnnnnnnnnnnnnnnnnnnnnnnnnnnnnnnnnnnnnnnnnnnnnnnnnnnnnnnnnnnnnnnnnnnnnnnnnnnnnnnnnnnnnnnnnnnnnnnnnnnnnnnnnnnnnnnnnnnnnnnnnnnnnnnnnnnnnnnnnnnnnnnnnnnnnnnnnnnnnnnnnnnnnnnnnnnnnnnnnnnnnnnnnnnnnnnnnnnnnnnnnnnnnnnnnnnnnnnnnnnnnnnnnnnnnnnnnnnnnnnnnnnnnnnnnnnnnnnnnnnnnnnnnnnnnnnnnnnnnnnnnnnnnnnnnnnnnnnnnnnnnnnnnnnnnnnnnnnnnnnnnnnnnnnnnnnnnnnnnnnnnnnnnnnnnnnnnnnnnnnnnnnnnnnnnnnnnnnnnnnnnnnnnnnnnnnnnnnnnnnnnnnnnnnnnnnnnnnnnnnnnnnnnnnnnnnnnnnnnnnnnnnnnnnnnnnnnnnnnnnnnnnnnnnnnnnnnnnnnnnnnnnnnnnnnnnnnnnnnnnnnnnnnnnnnnnnnnnnnnnnnnnnnnnnnnnnnnnnnnnnnnnnnnnnnnnnnnnnnnnnnnnnnnnnnnnnnnnnnnnnnnnnnnnnnnnnnnnnnnnnnnnnnnnnnnnnnnnnnnnnnnnnnnnnnnnnnnnnnnnnnnnnnnnnnnnnnnnnnnnnnnnnnnnnnnnnnnnnnnnnnnnnnnnnnnnnnnnnnnnnnnnnnnnnnnnnnnnnnnnnnnnnnnnnnnnnnnnnnnnnnnnnnnnnnnnnnnnnnnnnnnnnnnnnnnnnnnnnnnnnnnnnnnnnnnnnnnnnnnnnnnnnnnnnnnnnnnnnnnnnnnnnnnnnnnnnnnnnnnnnnnnnnnnnnnnnnnnnnnnnnnnnnnnnnnnnnnnnnnnnnnnnnnnnnnnnnnnnnnnnnnnnnnnnnnnnnnnnnnnnnnnnnnnnnnnnnnnnnnnnnnnnnnnnnnnnnnnnnnnnnnnnnnnnnnnnnnnnnnnnnnnnnnnnnnnnnnnnnnnnnnnnnnnnnnnnnnnnnnnnnnnnnnnnnnnnnnnnnnnnnnnnnnnnnnnnnnnnnnnnnnnnnnnnnnnnnnnnnnnnnnnnnnnnnnnnnnnnnnnnnnnnnnnnnnnnnnnnnnnnnnnnnnnnnnnnnnnnnnnnnnnnnnnnnnnnnnnnnnnnnnnnnnnnnnnnnnnnnnnnnnnnnnnnnnnnnnnnnnnnnnnnnnnnnnnnnnnnnnnnnnnnnnnnnnnnnnnnnnnnnnnnnnnnnnnnnnnnnnnnnnnnnnnnnnnnnnnnnnnnnnnnnnnnnnnnnnnnnnnnnnnnnnnnnnnnnnnnnnnnnnnnnnnnnnnnnnnnnnnnnnnnnnnnnnnnnnnnnnnnnnnnnnnnnnnnnnnnnnnnnnnnnnnnnnnnnnnnnnnnnnnnnnnnnnnnnnnnnnnnnnnnnnnnnnnnnnnnnnnnnnnnnnnnnnnnnnnnnnnnnnnnnnnnnnnnnnnnnnnnnnnnnnnnnnnnnnnnnnnnnnnnnnnnnnnnnnnnnnnnnnnnnnnnnnnnnnnnnnnnnnnnnnnnnnnnnnnnnnnnnnnnnnnnnnnnnnnnnnnnnnnnnnnnnnnnnnnnnnnnnnnnnnnnnnnnnnnnnnnnnnnnnnnnnnnnnnnnnnnnnnnnnnnnnnnnnnnnnnnnnnnnnnnnnnnnnnnnnnnnnnnnnnnnnnnnnnnnnnnnnnnnnnnnnnnnnnnnnnnnnnnnnnnnnnnnnnnnnnnnnnnnnnnnnnnnnnnnnnnnnnnnnnnnnnnnnnnnnnnnnnnnnnnnnnnnnnnnnnnnnnnnnnnnnnnnnnnnnnnnnnnnnnnnnnnnnnnnnnnnnnnnnnnnnnnnnnnnnnnnnnnnnnnnnnnnnnnnnnnnnnnnnnnnnnnnnnnnnnnnnnnnnnnnnnnnnnnnnnnnnnnnnnnnnnnnnnnnnnnnnnnnnnnnnnnnnnnnnnnnnnnnnnnnnnnnnnnnnnnnnnnnnnnnnnnnnnnnnnnnnnnnnnnnnnnnnnnnnnnnnnnnnnnnnnnnnnnnnnnnnnnnnnnnnnnnnnnnnnnnnnnnnnnnnnnnnnnnnnnnnnnnnnnnnnnnnnnnnnnnnnnnnnnnnnnnnnnnnnnnnnnnnnnnnnnnnnnnnnnnnnnnnnnnnnnnnnnnnnnnnnnnnnnnnnnnnnnnnnnnnnnnnnnnnnnnnnnnnnnnnnnnnnnnnnnnnnnnnnnnnnnnnnnnnnnnnnnnnnnnnnnnnnnnnnnnnnnnnnnnnnnnnnnnnnnnnnnnnnnnnnnnnnnnnnnnnnnnnnnnnnnnnnnnnnnnnnnnnnnnnnnnnnnnnnnnnnnnnnnnnnnnnnnnnnnnnnnnnnnnnnnnnnnnnnnnnnnnnnnnnnnnnnnnnnnnnnnnnnnnnnnnnnnnnnnnnnnnnnnnnnnnnnnnnnnnnnnnnnnnnnnnnnnnnnnnnnnnnnnnnnnnnnnnnnnnnnnnnnnnnnnnnnnnnnnnnnnnnnnnnnnnnnnnnnnnnnnnnnnnnnnnnnnnnnnnnnnnnnnnnnnnnnnnnnnnnnnnnnnnnnnnnnnnnnnnnnnnnnnnnnnnnnnnnnnnnnnnnnnnnnnnnnnnnnnnnnnnnnnnnnnnnnnnnnnnnnnnnnnnnnnnnnnnnnnnnnnnnnnnnnnnnnnnnnnnnnnnnnnnnnnnnnnnnnnnnnnnnnnnnnnnnnnnnnnnnnnnnnnnnnnnnnnnnnnnnnnnnnnnnnnnnnnnnnnnnnnnnnnnnnnnnnnnnnnnnnnnnnnnnnnnnnnnnnnnnnnnnnnnnnnnnnnnnnnnnnnnnnnnnnnnnnnnnnnnnnnnnnnnnnnnnnnnnnnnnnnnnnnnnnnnnnnnnnnnnnnnnnnnnnnnnnnnnnnnnnnnnnnnnnnnnnnnnnnnnnnnnnnnnnnnnnnnnnnnnnnnnnnnnnnnnnnnnnnnnnnnnnnnnnnnnnnnnnnnnnnnnnnnnnnnnnnnnnnnnnnnnnnnnnnnnnnnnnnnnnnnnnnnnnnnnnnnnnnnnnnnnnnnnnnnnnnnnnnnnnnnnnnnnnnnnnnnnnnnnnnnnnnnnnnnnnnnnnnnnnnnnnnnnnnnnnnnnnnnnnnnnnnnnnnnnnnnnnnnnnnnnnnnnnnnnnnnnnnnnnnnnnnnnnnnnnnnnnnnnnnnnnnnnnnnnnnnnnnnnnnnnnnnnnnnnnnnnnnnnnnnnnnnnnnnnnnnnnnnnnnnnnnnnnnnnnnnnnnnnnnnnnnnnnnnnnnnnnnnnnnnnnnnnnnnnnnnnnnnnnnnnnnnnnnnnnnnnnnnnnnnnnnnnnnnnnnnnnnnnnnnnnnnnnnnnnnnnnnnnnnnnnnnnnnnnnnnnnnnnnnnnnnnnnnnnnnnnnnnnnnnnnnnnnnnnnnnnnnnnnnnnnnnnnnnnnnnnnnnnnnnnnnnnnnnnnnnnnnnnnnnnnnnnnnnnnnnnnnnnnnnnnnnnnnnnnnnnnnnnnnnnnnnnnnnnnnnnnnnnnnnnnnnnnnnnnnnnnnnnnnnnnnnnnnnnnnnnnnnnnnnnnnnnnnnnnnnnnnnnnnnnnnnnnnnnnnnnnnnnnnnnnnnnnnnnnnnnnnnnnnnnnnnnnnnnnnnnnnnnnnnnnnnnnnnnnnnnnnnnnnnnnnnnnnnnnnnnnnnnnnnnnnnnnnnnnnnnnnnnnnnnnnnnnnnnnnnnnnnnnnnnnnnnnnnnnnnnnnnnnnnnnnnnnnnnnnnnnnnnnnnnnnnnnnnnnnnnnnnnnnnnnnnnnnnnnnnnnnnnnnnnnnnnnnnnnnnnnnnnnnnnnnnnnnnnnnnnnnnnnnnnnnnnnnnnnnnnnnnnnnnnnnnnnnnnnnnnnnnnnnnnnnnnnnnnnnnnnnnnnnnnnnnnnnnnnnnnnnnnnnnnnnnnnnnnnnnnnnnnnnnnnnnnnnnnnnnnnnnnnnnnnnnnnnnnnnnnnnnnnnnnnnnnnnnnnnnnnnnnnnnnnnnnnnnnnnnnnnnnnnnnnnnnnnnnnnnnnnnnnnnnnnnnnnnnnnnnnnnnnnnnnnnnnnnnnnnnnnnnnnnnnnnnnnnnnnnnnnnnnnnnnnnnnnnnnnnnnnnnnnnnnnnnnnnnnnnnnnnnnnnnnnnnnnnnnnnnnnnnnnnnnnnnnnnnnnnnnnnnnnnnnnnnnnnnnnnnnnnnnnnnnnnnnnnnnnnnnnnnnnnnnnnnnnnnnnnnnnnnnnnnnnnnnnnnnnnnnnnnnnnnnnnnnnnnnnnnnnnnnnnnnnnnnnnnnnnnnnnnnnnnnnnnnnnnnnnnnnnnnnnnnnnnnnnnnnnnnnnnnnnnnnnnnnnnnnnnnnnnnnnnnnnnnnnnnnnnnnnnnnnnnnnnnnnnnnnnnnnnnnnnnnnnnnnnnnnnnnnnnnnnnnnnnnnnnnnnnnnnnnnnnnnnnnnnnnnnnnnnnnnnnnnnnnnnnnnnnnnnnnnnnnnnnnnnnnnnnnnnnnnnnnnnnnnnnnnnnnnnnnnnnnnnnnnnnnnnnnnnnnnnnnnnnnnnnnnnnnnnnnnnnnnnnnnnnnnnnnnnnnnnnnnnnnnnnnnnnnnnnnnnnnnnnnnnnnnnnnnnnnnnnnnnnnnnnnnnnnnnnnnnnnnnnnnnnnnnnnnnnnnnnnnnnnnnnnnnnnnnnnnnnnnnnnnnnnnnnnnnnnnnnnnnnnnnnnnnnnnnnnnnnnnnnnnnnnnnnnnnnnnnnnnnnnnnnnnnnnnnnnnnnnnnnnnnnnnnnnnnnnnnnnnnnnnnnnnnnnnnnnnnnnnnnnnnnnnnnnnnnnnnnnnnnnnnnnnnnnnnnnnnnnnnnnnnnnnnnnnnnnnnnnnnnnnnnnnnnnnnnnnnnnnnnnnnnnnnnnnnnnnnnnnnnnnnnnnnnnnnnnnnnnnnnnnnnnnnnnnnnnnnnnnnnnnnnnnnnnnnnnnnnnnnnnnnnnnnnnnnnnnnnnnnnnnnnnnnnnnnnnnnnnnnnnnnnnnnnnnnnnnnnnnnnnnnnnnnnnnnnnnnnnnnnnnnnnnnnnnnnnnnnnnnnnnnnnnnnnnnnnnnnnnnnnnnnnnnnnnnnnnnnnnnnnnnnnnnnnnnnnnnnnnnnnnnnnnnnnnnnnnnnnnnnnnnnnnnnnnnnnnnnnnnnnnnnnnnnnnnnnnnnnnnnnnnnnnnnnnnnnnnnnnnnnnnnnnnnnnnnnnnnnnnnnnnnnnnnnnnnnnnnnnnnnnnnnnnnnnnnnnnnnnnnnnnnnnnnnnnnnnnnnnnnnnnnnnnnnnnnnnnnnnnnnnnnnnnnnnnnnnnnnnnnnnnnnnnnnnnnnnnnnnnnnnnnnnnnnnnnnnnnnnnnnnnnnnnnnnnnnnnnnnnnnnnnnnnnnnnnnnnnnnnnnnnnnnnnnnnnnnnnnnnnnnnnnnnnnnnnnnnnnnnnnnnnnnnnnnnnnnnnnnnnnnnnnnnnnnnnnnnnnnnnnnnnnnnnnnnnnnnnnnnnnnnnnnnnnnnnnnnnnnnnnnnnnnnnnnnnnnnnnnnnnnnnnnnnnnnnnnnnnnnnnnnnnnnnnnnnnnnnnnnnnnnnnnnnnnnnnnnnnnnnnnnnnnnnnnnnnnnnnnnnnnnnnnnnnnnnnnnnnnnnnnnnnnnnnnnnnnnnnnnnnnnnnnnnnnnnnnnnnnnnnnnnnnnnnnnnnnnnnnnnnnnnnnnnnnnnnnnnnnnnnnnnnnnnnnnnnnnnnnnnnnnnnnnnnnnnnnnnnnnnnnnnnnnnnnnnnnnnnnnnnnnnnnnnnnnnnnnnnnnnnnnnnnnnnnnnnnnnnnnnnnnnnnnnnnnnnnnnnnnnnnnnnnnnnnnnnnnnnnnnnnnnnnnnnnnnnnnnnnnnnnnnnnnnnnnnnnnnnnnnnnnnnnnnnnnnnnnnnnnnnnnnnnnnnnnnnnnnnnnnnnnnnnnnnnnnnnnnnnnnnnnnnnnnnnnnnnnnnnnnnnnnnnnnnnnnnnnnnnnnnnnnnnnnnnnnnnnnnnnnnnnnnnnnnnnnnnnnnnnnnnnnnnnnnnnnnnnnnnnnnnnnnnnnnnnnnnnnnnnnnnnnnnnnnnnnnnnnnnnnnnnnnnnnnnnnnnnnnnnnnnnnnnnnnnnnnnnnnnnnnnnnnnnnnnnnnnnnnnnnnnnnnnnnnnnnnnnnnnnnnnnnnnnnnnnnnnnnnnnnnnnnnnnnnnnnnnnnnnnnnnnnnnnnnnnnnnnnnnnnnnnnnnnnnnnnnnnnnnnnnnnnnnnnnnnnnnnnnnnnnnnnnnnnnnnnnnnnnnnnnnnnnnnnnnnnnnnnnnnnnnnnnnnnnnnnnnnnnnnnnnnnnnnnnnnnnnnnnnnnnnnnnnnnnnnnnnnnnnnnnnnnnnnnnnnnnnnnnnnnnnnnnnnnnnnnnnnnnnnnnnnnnnnnnnnnnnnnnnnnnnnnnnnnnnnnnnnnnnnnnnnnnnnnnnnnnnnnnnnnnnnnnnnnnnnnnnnnnnnnnnnnnnnnnnnnnnnnnnnnnnnnnnnnnnnnnnnnnnnnnnnnnnnnnnnnnnnnnnnnnnnnnnnnnnnnnnnnnnnnnnnnnnnnnnnnnnnnnnnnnnnnnnnnnnnnnnnnnnnnnnnnnnnnnnnnnnnnnnnnnnnnnnnnnnnnnnnnnnnnnnnnnnnnnnnnnnnnnnnnnnnnnnnnnnnnnnnnnnnnnnnnnnnnnnnnnnnnnnnnnnnnnnnnnnnnnnnnnnnnnnnnnnnnnnnnnnnnnnnnnnnnnnnnnnnnnnnnnnnnnnnnnnnnnnnnnnnnnnnnnnnnnnnnnnnnnnnnnnnnnnnnnnnnnnnnnnnnnnnnnnnnnnnnnnnnnnnnnnnnnnnnnnnnnnnnnnnnnnnnnnnnnnnnnnnnnnnnnnnnnnnnnnnnnnnnnnnnnnnnnnnnnnnnnnnnnnnnnnnnnnnnnnnnnnnnnnnnnnnnnnnnnnnnnnnnnnnnnnnnnnnnnnnnnnnnnnnnnnnnnnnnnnnnnnnnnnnnnnnnnnnnnnnnnnnnnnnnnnnnnnnnnnnnnnnnnnnnnnnnnnnnnnnnnnnnnnnnnnnnnnnnnnnnnnnnnnnnnnnnnnnnnnnnnnnnnnnnnnnnnnnnnnnnnnnnnnnnnnnnnnnnnnnnnnnnnnnnnnnnnnnnnnnnnnnnnnnnnnnnnnnnnnnnnnnnnnnnnnnnnnnnnnnnnnnnnnnnnnnnnnnnnnnnnnnnnnnnnnnnnnnnnnnnnnnnnnnnnnnnnnnnnnnnnnnnnnnnnnnnnnnnnnnnnnnnnnnnnnnnnnnnnnnnnnnnnnnnnnnnnnnnnnnnnnnnnnnnnnnnnnnnnnnnnnnnnnnnnnnnnnnnnnnnnnnnnnnnnnnnnnnnnnnnnnnnnnnnnnnnnnnnnnnnnnnnnnnnnnnnnnnnnnnnnnnnnnnnnnnnnnnnnnnnnnnnnnnnnnnnnnnnnnnnnnnnnnnnnnnnnnnnnnnnnnnnnnnnnnnnnnnnnnnnnnnnnnnnnnnnnnnnnnnnnnnnnnnnnnnnnnnnnnnnnnnnnnnnnnnnnnnnnnnnnnnnnnnnnnnnnnnnnnnnnnnnnnnnnnnnnnnnnnnnnnnnnnnnnnnnnnnnnnnnnnnnnnnnnnnnnnnnnnnnnnnnnnnnnnnnnnnnnnnnnnnnnnnnnnnnnnnnnnnnnnnnnnnnnnnnnnnnnnnnnnnnnnnnnnnnnnnnnnnnnnnnnnnnnnnnnnnnnnnnnnnnnnnnnnnnnnnnnnnnnnnnnnnnnnnnnnnnnnnnnnnnnnnnnnnnnnnnnnnnnnnnnnnnnnnnnnnnnnnnnnnnnnnnnnnnnnnnnnnnnnnnnnnnnnnnnnnnnnnnnnnnnnnnnnnnnnnnnnnnnnnnnnnnnnnnnnnnnnnnnnnnnnnnnnnnnnnnnnnnnnnnnnnnnnnnnnnnnnnnnnnnnnnnnnnnnnnnnnnnnnnnnnnnnnnnnnnnnnnnnnnnnnnnnnnnnnnnnnnnnnnnnnnnnnnnnnnnnnnnnnnnnnnnnnnnnnnnnnnnnnnnnnnnnnnnnnnnnnnnnnnnnnnnnnnnnnnnnnnnnnnnnnnnnnnnnnnnnnnnnnnnnnnnnnnnnnnnnnnnnnnnnnnnnnnnnnnnnnnnnnnnnnnnnnnnnnnnnnnnnnnnnnnnnnnnnnnnnnnnnnnnnnnnnnnnnnnnnnnnnnnnnnnnnnnnnnnnnnnnnnnnnnnnnnnnnnnnnnnnnnnnnnnnnnnnnnnnnnnnnnnnnnnnnnnnnnnnnnnnnnnnnnnnnnnnnnnnnnnnnnnnnnnnnnnnnnnnnnnnnnnnnnnnnnnnnnnnnnnnnnnnnnnnnnnnnnnnnnnnnnnnnnnnnnnnnnnnnnnnnnnnnnnnnnnnnnnnnnnnnnnnnnnnnnnnnnnnnnnnnnnnnnnnnnnnnnnnnnnnnnnnnnnnnnnnnnnnnnnnnnnnnnnnnnnnnnnnnnnnnnnnnnnnnnnnnnnnnnnnnnnnnnnnnnnnnnnnnnnnnnnnnnnnnnnnnnnnnnnnnnnnnnnnnnnnnnnnnnnnnnnnnnnnnnnnnnnnnnnnnnnnnnnnnnnnnnnnnnnnnnnnnnnnnnnnnnnnnnnnnnnnnnnnnnnnnnnnnnnnnnnnnnnnnnnnnnnnnnnnnnnnnnnnnnnnnnnnnnnnnnnnnnnnnnnnnnnnnnnnnnnnnnnnnnnnnnnnnnnnnnnnnnnnnnnnnnnnnnnnnnnnnnnnnnnnnnnnnnnnnnnnnnnnnnnnnnnnnnnnnnnnnnnnnnnnnnnnnnnnnnnnnnnnnnnnnnnnnnnnnnnnnnnnnnnnnnnnnnnnnnnnnnnnnnnnnnnnnnnnnnnnnnnnnnnnnnnnnnnnnnnnnnnnnnnnnnnnnnnnnnnnnnnnnnnnnnnnnnnnnnnnnnnnnnnnnnnnnnnnnnnnnnnnnnnnnnnnnnnnnnnnnnnnnnnnnnnnnnnnnnnnnnnnnnnnnnnnnnnnnnnnnnnnnnnnnnnnnnnnnnnnnnnnnnnnnnnnnnnnnnnnnnnnnnnnnnnnnnnnnnnnnnnnnnnnnnnnnnnnnnnnnnnnnnnnnnnnnnnnnnnnnnnnnnnnnnnnnnnnnnnnnnnnnnnnnnnnnnnnnnnnnnnnnnnnnnnnnnnnnnnnnnnnnnnnnnnnnnnnnnnnnnnnnnnnnnnnnnnnnnnnnnnnnnnnnnnnnnnnnnnnnnnnnnnnnnnnnnnnnnnnnnnnnnnnnnnnnnnnnnnnnnnnnnnnnnnnnnnnnnnnnnnnnnnnnnnnnnnnnnnnnnnnnnnnnnnnnnnnnnnnnnnnnnnnnnnnnnnnnnnnnnnnnnnnnnnnnnnnnnnnnnnnnnnnnnnnnnnnnnnnnnnnnnnnnnnnnnnnnnnnnnnnnnnnnnnnnnnnnnnnnnnnnnnnnnnnnnnnnnnnnnnnnnnnnnnnnnnnnnnnnnnnnnnnnnnnnnnnnnnnnnnnnnnnnnnnnnnnnnnnnnnnnnnnnnnnnnnnnnnnnnnnnnnnnnnnnnnnnnnnnnnnnnnnnnnnnnnnnnnnnnnnnnnnnnnnnnnnnnnnnnnnnnnnnnnnnnnnnnnnnnnnnnnnnnnnnnnnnnnnnnnnnnnnnnnnnnnnnnnnnnnnnnnnnnnnnnnnnnnnnnnnnnnnnnnnnnnnnnnnnnnnnnnnnnnnnnnnnnnnnnnnnnnnnnnnnnnnnnnnnnnnnnnnnnnnnnnnnnnnnnnnnnnnnnnnnnnnnnnnnnnnnnnnnnnnnnnnnnnnnnnnnnnnnnnnnnnnnnnnnnnnnnnnnnnnnnnnnnnnnnnnnnnnnnnnnnnnnnnnnnnnnnnnnnnnnnnnnnnnnnnnnnnnnnnnnnnnnnnnnnnnnnnnnnnnnnnnnnnnnnnnnnnnnnnnnnnnnnnnnnnnnnnnnnnnnnnnnnnnnnnnnnnnnnnnnnnnnnnnnnnnnnnnnnnnnnnnnnnnnnnnnnnnnnnnnnnnnnnnnnnnnnnnnnnnnnnnnnnnnnnnnnnnnnnnnnnnnnnnnnnnnnnnnnnnnnnnnnnnnnnnnnnnnnnnnnnnnnnnnnnnnnnnnnnnnnnnnnnnnnnnnnnnnnnnnnnnnnnnnnnnnnnnnnnnnnnnnnnnnnnnnnnnnnnnnnnnnnnnnnnnnnnnnnnnnnnnnnnnnnnnnnnnnnnnnnnnnnnnnnnnnnnnnnnnnnnnnnnnnnnnnnnnnnnnnnnnnnnnnnnnnnnnnnnnnnnnnnnnnnnnnnnnnnnnnnnnnnnnnnnnnnnnnnnnnnnnnnnnnnnnnnnnnnnnnnnnnnnnnnnnnnnnnnnnnnnnnnnnnnnnnnnnnnnnnnnnnnnnnnnnnnnnnnnnnnnnnnnnnnnnnnnnnnnnnnnnnnnnnnnnnnnnnnnnnnnnnnnnnnnnnnnnnnnnnnnnnnnnnnnnnnnnnnnnnnnnnnnnnnnnnnnnnnnnnnnnnnnnnnnnnnnnnnnnnnnnnnnnnnnnnnnnnnnnnnnnnnnnnnnnnnnnnnnnnnnnnnnnnnnnnnnnnnnnnnnnnnnnnnnnnnnnnnnnnnnnnnnnnnnnnnnnnnnnnnnnnnnnnnnnnnnnnnnnnnnnnnnnnnnnnnnnnnnnnnnnnnnnnnnnnnnnnnnnnnnnnnnnnnnnnnnnnnnnnnnnnnnnnnnnnnnnnnnnnnnnnnnnnnnnnnnnnnnnnnnnnnnnnnnnnnnnnnnnnnnnnnnnnnnnnnnnnnnnnnnnnnnnnnnnnnnnnnnnnnnnnnnnnnnnnnnnnnnnnnnnnnnnnnnnnnnnnnnnnnnnnnnnnnnnnnnnnnnnnnnnnnnnnnnnnnnnnnnnnnnnnnnnnnnnnnnnnnnnnnnnnnnnnnnnnnnnnnnnnnnnnnnnnnnnnnnnnnnnnnnnnnnnnnnnnnnnnnnnnnnnnnnnnnnnnnnnnnnnnnnnnnnnnnnnnnnnnnnnnnnnnnnnnnnnnnnnnnnnnnnnnnnnnnnnnnnnnnnnnnnnnnnnnnnnnnnnnnnnnnnnnnnnnnnnnnnnnnnnnnnnnnnnnnnnnnnnnnnnnnnnnnnnnnnnnnnnnnnnnnnnnnnnnnnnnnnnnnnnnnnnnnnnnnnnnnnnnnnnnnnnnnnnnnnnnnnnnnnnnnnnnnnnnnnnnnnnnnnnnnnnnnnnnnnnnnnnnnnnnnnnnnnnnnnnnnnnnnnnnnnnnnnnnnnnnnnnnnnnnnnnnnnnnnnnnnnnnnnnnnnnnnnnnnnnnnnnnnnnnnnnnnnnnnnnnnnnnnnnnnnnnnnnnnnnnnnnnnnnnnnnnnnnnnnnnnnnnnnnnnnnnnnnnnnnnnnnnnnnnnnnnnnnnnnnnnnnnnnnnnnnnnnnnnnnnnnnnnnnnnnnnnnnnnnnnnnnnnnnnnnnnnnnnnnnnnnnnnnnnnnnnnnnnnnnnnnnnnnnnnnnnnnnnnnnnnnnnnnnnnnnnnnnnnnnnnnnnnnnnnnnnnnnnnnnnnnnnnnnnnnnnnnnnnnnnnnnnnnnnnnnnnnnnnnnnnnnnnnnnnnnnnnnnnnnnnnnnnnnnnnnnnnnnnnnnnnnnnnnnnnnnnnnnnnnnnnnnnnnnnnnnnnnnnnnnnnnnnnnnnnnnnnnnnnnnnnnnnnnnnnnnnnnnnnnnnnnnnnnnnnnnnnnnnnnnnnnnnnnnnnnnnnnnnnnnnnnnnnnnnnnnnnnnnnnnnnnnnnnnnnnnnnnnnnnnnnnnnnnnnnnnnnnnnnnnnnnnnnnnnnnnnnnnnnnnnnnnnnnnnnnnnnnnnnnnnnnnnnnnnnnnnnnnnnnnnnnnnnnnnnnnnnnnnnnnnnnnnnnnnnnnnnnnnnnnnnnnnnnnnnnnnnnnnnnnnnnnnnnnnnnnnnnnnnnnnnnnnnnnnnnnnnnnnnnnnnnnnnnnnnnnnnnnnnnnnnnnnnnnnnnnnnnnnnnnnnnnnnnnnnnnnnnnnnnnnnnnnnnnnnnnnnnnnnnnnnnnnnnnnnnnnnnnnnnnnnnnnnnnnnnnnnnnnnnnnnnnnnnnnnnnnnnnnnnnnnnnnnnnnnnnnnnnnnnnnnnnnnnnnnnnnnnnnnnnnnnnnnnnnnnnnnnnnnnnnnnnnnnnnnnnnnnnnnnnnnnnnnnnnnnnnnnnnnnnnnnnnnnnnnnnnnnnnnnnnnnnnnnnnnnnnnnnnnnnnnnnnnnnnnnnnnnnnnnnnnnnnnnnnnnnnnnnnnnnnnnnnnnnnnnnnnnnnnnnnnnnnnnnnnnnnnnnnnnnnnnnnnnnnnnnnnnnnnnnnnnnnnnnnnnnnnnnnnnnnnnnnnnnnnnnnnnnnnnnnnnnnnnnnnnnnnnnnnnnnnnnnnnnnnnnnnnnnnnnnnnnnnnnnnnnnnnnnnnnnnnnnnnnnnnnnnnnnnnnnnnnnnnnnnnnnnnnnnnnnnnnnnnnnnnnnnnnnnnnnnnnnnnnnnnnnnnnnnnnnnnnnnnnnnnnnnnnnnnnnnnnnnnnnnnnnnnnnnnnnnnnnnnnnnnnnnnnnnnnnnnnnnnnnnnnnnnnnnnnnnnnnnnnnnnnnnnnnnnnnnnnnnnnnnnnnnnnnnnnnnnnnnnnnnnnnnnnnnnnnnnnnnnnnnnnnnnnnnnnnnnnnnnnnnnnnnnnnnnnnnnnnnnnnnnnnnnnnnnnnnnnnnnnnnnnnnnnnnnnnnnnnnnnnnnnnnnnnnnnnnnnnnnnnnnnnnnnnnnnnnnnnnnnnnnnnnnnnnnnnnnnnnnnnnnnnnnnnnnnnnnnnnnnnnnnnnnnnnnnnnnnnnnnnnnnnnnnnnnnnnnnnnnnnnnnnnnnnnnnnnnnnnnnnnnnnnnnnnnnnnnnnnnnnnnnnnnnnnnnnnnnnnnnnnnnnnnnnnnnnnnnnnnnnnnnnnnnnnnnnnnnnnnnnnnnnnnnnnnnnnnnnnnnnnnnnnnnnnnnnnnnnnnnnnnnnnnnnnnnnnnnnnnnnnnnnnnnnnnnnnnnnnnnnnnnnnnnnnnnnnnnnnnnnnnnnnnnnnnnnnnnnnnnnnnnnnnnnnnnnnnnnnnnnnnnnnnnnnnnnnnnnnnnnnnnnnnnnnnnnnnnnnnnnnnnnnnnnnnnnnnnnnnnnnnnnnnnnnnnnnnnnnnnnnnnnnnnnnnnnnnnnnnnnnnnnnnnnnnnnnnnnnnnnnnnnnnnnnnnnnnnnnnnnnnnnnnnnnnnnnnnnnnnnnnnnnnnnnnnnnnnnnnnnnnnnnnnnnnnnnnnnnnnnnnnnnnnnnnnnnnnnnnnnnnnnnnnnnnnnnnnnnnnnnnnnnnnnnnnnnnnnnnnnnnnnnnnnnnnnnnnnnnnnnnnnnnnnnnnnnnnnnnnnnnnnnnnnnnnnnnnnnnnnnnnnnnnnnnnnnnnnnnnnnnnnnnnnnnnnnnnnnnnnnnnnnnnnnnnnnnnnnnnnnnnnnnnnnnnnnnnnnnnnnnnnnnnnnnnnnnnnnnnnnnnnnnnnnnnnnnnnnnnnnnnnnnnnnnnnnnnnnnnnnnnnnnnnnnnnnnnnnnnnnnnnnnnnnnnnnnnnnnnnnnnnnnnnnnnnnnnnnnnnnnnnnnnnnnnnnnnnnnnnnnnnnnnnnnnnnnnnnnnnnnnnnnnnnnnnnnnnnnnnnnnnnnnnnnnnnnnnnnnnnnnnnnnnnnnnnnnnnnnnnnnnnnnnnnnnnnnnnnnnnnnnnnnnnnnnnnnnnnnnnnnnnnnnnnnnnnnnnnnnnnnnnnnnnnnnnnnnnnnnnnnnnnnnnnnnnnnnnnnnnnnnnnnnnnnnnnnnnnnnnnnnnnnnnnnnnnnnnnnnnnnnnnnnnnnnnnnnnnnnnnnnnnnnnnnnnnnnnnnnnnnnnnnnnnnnnnnnnnnnnnnnnnnnnnnnnnnnnnnnnnnnnnnnnnnnnnnnnnnnnnnnnnnnnnnnnnnnnnnnnnnnnnnnnnnnnnnnnnnnnnnnnnnnnnnnnnnnnnnnnnnnnnnnnnnnnnnnnnnnnnnnnnnnnnnnnnnnnnnnnnnnnnnnnnnnnnnnnnnnnnnnnnnnnnnnnnnnnnnnnnnnnnnnnnnnnnnnnnnnnnnnnnnnnnnnnnnnnnnnnnnnnnnnnnnnnnnnnnnnnnnnnnnnnnnnnnnnnnnnnnnnnnnnnnnnnnnnnnnnnnnnnnnnnnnnnnnnnnnnnnnnnnnnnnnnnnnnnnnnnnnnnnnnnnnnnnnnnnnnnnnnnnnnnnnnnnnnnnnnnnnnnnnnnnnnnnnnnnnnnnnnnnnnnnnnnnnnnnnnnnnnnnnnnnnnnnnnnnnnnnnnnnnnnnnnnnnnnnnnnnnnnnnnnnnnnnnnnnnnnnnnnnnnnnnnnnnnnnnnnnnnnnnnnnnnnnnnnnnnnnnnnnnnnnnnnnnnnnnnnnnnnnnnnnnnnnnnnnnnnnnnnnnnnnnnnnnnnnnnnnnnnnnnnnnnnnnnnnnnnnnnnnnnnnnnnnnnnnnnnnnnnnnnnnnnnnnnnnnnnnnnnnnnnnnnnnnnnnnnnnnnnnnnnnnnnnnnnnnnnnnnnnnnnnnnnnnnnnnnnnnnnnnnnnnnnnnnnnnnnnnnnnnnnnnnnnnnnnnnnnnnnnnnnnnnnnnnnnnnnnnnnnnnnnnnnnnnnnnnnnnnnnnnnnnnnnnnnnnnnnnnnnnnnnnnnnnnnnnnnnnnnnnnnnnnnnnnnnnnnnnnnnnnnnnnnnnnnnnnnnnnnnnnnnnnnnnnnnnnnnnnnnnnnnnnnnnnnnnnnnnnnnnnnnnnnnnnnnnnnnnnnnnnnnnnnnnnnnnnnnnnnnnnnnnnnnnnnnnnnnnnnnnnnnnnnnnnnnnnnnnnnnnnnnnnnnnnnnnnnnnnnnnnnnnnnnnnnnnnnnnnnnnnnnnnnnnnnnnnnnnnnnnnnnnnnnnnnnnnnnnnnnnnnnnnnnnnnnnnnnnnnnnnnnnnnnnnnnnnnnnnnnnnnnnnnnnnnnnnnnnnnnnnnnnnnnnnnnnnnnnnnnnnnnnnnnnnnnnnnnnnnnnnnnnnnnnnnnnnnnnnnnnnnnnnnnnnnnnnnnnnnnnnnnnnnnnnnnnnnnnnnnnnnnnnnnnnnnnnnnnnnnnnnnnnnnnnnnnnnnnnnnnnnnnnnnnnnnnnnnnnnnnnnnnnnnnnnnnnnnnnnnnnnnnnnnnnnnnnnnnnnnnnnnnnnnnnnnnnnnnnnnnnnnnnnnnnnnnnnnnnnnnnnnnnnnnnnnnnnnnnnnnnnnnnnnnnnnnnnnnnnnnnnnnnnnnnnnnnnnnnnnnnnnnnnnnnnnnnnnnnnnnnnnnnnnnnnnnnnnnnnnnnnnnnnnnnnnnnnnnnnnnnnnnnnnnnnnnnnnnnnnnnnnnnnnnnnnnnnnnnnnnnnnnnnnnnnnnnnnnnnnnnnnnnnnnnnnnnnnnnnnnnnnnnnnnnnnnnnnnnnnnnnnnnnnnnnnnnnnnnnnnnnnnnnnnnnnnnnnnnnnnnnnnnnnnnnnnnnnnnnnnnnnnnnnnnnnnnnnnnnnnnnnnnnnnnnnnnnnnnnnnnnnnnnnnnnnnnnnnnnnnnnnnnnnnnnnnnnnnnnnnnnnnnnnnnnnnnnnnnnnnnnnnnnnnnnnnnnnnnnnnnnnnnnnnnnnnnnnnnnnnnnnnnnnnnnnnnnnnnnnnnnnnnnnnnnnnnnnnnnnnnnnnnnnnnnnnnnnnnnnnnnnnnnnnnnnnnnnnnnnnnnnnnnnnnnnnnnnnnnnnnnnnnnnnnnnnnnnnnnnnnnnnnnnnnnnnnnnnnnnnnnnnnnnnnnnnnnnnnnnnnnnnnnnnnnnnnnnnnnnnnnnnnnnnnnnnnnnnnnnnnnnnnnnnnnnnnnnnnnnnnnnnnnnnnnnnnnnnnnnnnnnnnnnnnnnnnnnnnnnnnnnnnnnnnnnnnnnnnnnnnnnnnnnnnnnnnnnnnnnnnnnnnnnnnnnnnnnnnnnnnnnnnnnnnnnnnnnnnnnnnnnnnnnnnnnnnnnnnnnnnnnnnnnnnnnnnnnnnnnnnnnnnnnnnnnnnnnnnnnnnnnnnnnnnnnnnnnnnnnnnnnnnnnnnnnnnnnnnnnnnnnnnnnnnnnnnnnnnnnnnnnnnnnnnnnnnnnnnnnnnnnnnnnnnnnnnnnnnnnnnnnnnnnnnnnnnnnnnnnnnnnnnnnnnnnnnnnnnnnnnnnnnnnnnnnnnnnnnnnnnnnnnnnnnnnnnnnnnnnnnnnnnnnnnnnnnnnnnnnnnnnnnnnnnnnnnnnnnnnnnnnnnnnnnnnnnnnnnnnnnnnnnnnnnnnnnnnnnnnnnnnnnnnnnnnnnnnnnnnnnnnnnnnnnnnnnnnnnnnnnnnnnnnnnnnnnnnnnnnnnnnnnnnnnnnnnnnnnnnnnnnnnnnnnnnnnnnnnnnnnnnnnnnnnnnnnnnnnnnnnnnnnnnnnnnnnnnnnnnnnnnnnnnnnnnnnnnnnnnnnnnnnnnnnnnnnnnnnnnnnnnnnnnnnnnnnnnnnnnnnnnnnnnnnnnnnnnnnnnnnnnnnnnnnnnnnnnnnnnnnnnnnnnnnnnnnnnnnnnnnnnnnnnnnnnnnnnnnnnnnnnnnnnnnnnnnnnnnnnnnnnnnnnnnnnnnnnnnnnnnnnnnnnnnnnnnnnnnnnnnnnnnnnnnnnnnnnnnnnnnnnnnnnnnnnnnnnnnnnnnnnnnnnnnnnnnnnnnnnnnnnnnnnnnnnnnnnnnnnnnnnnnnnnnnnnnnnnnnnnnnnnnnnnnnnnnnnnnnnnnnnnnnnnnnnnnnnnnnnnnnnnnnnnnnnnnnnnnnnnnnnnnnnnnnnnnnnnnnnnnnnnnnnnnnnnnnnnnnnnnnnnnnnnnnnnnnnnnnnnnnnnnnnnnnnnnnnnnnnnnnnnnnnnnnnnnnnnnnnnnnnnnnnnnnnnnnnnnnnnnnnnnnnnnnnnnnnnnnnnnnnnnnnnnnnnnnnnnnnnnnnnnnnnnnnnnnnnnnnnnnnnnnnnnnnnnnnnnnnnnnnnnnnnnnnnnnnnnnnnnnnnnnnnnnnnnnnnnnnnnnnnnnnnnnnnnnnnnnnnnnnnnnnnnnnnnnnnnnnnnnnnnnnnnnnnnnnnnnnnnnnnnnnnnnnnnnnnnnnnnnnnnnnnnnnnnnnnnnnnnnnnnnnnnnnnnnnnnnnnnnnnnnnnnnnnnnnnnnnnnnnnnnnnnnnnnnnnnnnnnnnnnnnnnnnnnnnnnnnnnnnnnnnnnnnnnnnnnnnnnnnnnnnnnnnnnnnnnnnnnnnnnnnnnnnnnnnnnnnnnnnnnnnnnnnnnnnnnnnnnnnnnnnnnnnnnnnnnnnnnnnnnnnnnnnnnnnnnnnnnnnnnnnnnnnnnnnnnnnnnnnnnnnnnnnnnnnnnnnnnnnnnnnnnnnnnnnnnnnnnnnnnnnnnnnnnnnnnnnnnnnnnnnnnnnnnnnnnnnnnnnnnnnnnnnnnnnnnnnnnnnnnnnnnnnnnnnnnnnnnnnnnnnnnnnnnnnnnnnnnnnnnnnnnnnnnnnnnnnnnnnnnnnnnnnnnnnnnnnnnnnnnnnnnnnnnnnnnnnnnnnnnnnnnnnnnnnnnnnnnnnnnnnnnnnnnnnnnnnnnnnnnnnnnnnnnnnnnnnnnnnnnnnnnnnnnnnnnnnnnnnnnnnnnnnnnnnnnnnnnnnnnnnnnnnnnnnnnnnnnnnnnnnnnnnnnnnnnnnnnnnnnnnnnnnnnnnnnnnnnnnnnnnnnnnnnnnnnnnnnnnnnnnnnnnnnnnnnnnnnnnnnnnnnnnnnnnnnnnnnnnnnnnnnnnnnnnnnnnnnnnnnnnnnnnnnnnnnnnnnnnnnnnnnnnnnnnnnnnnnnnnnnnnnnnnnnnnnnnnnnnnnnnnnnnnnnnnnnnnnnnnnnnnnnnnnnnnnnnnnnnnnnnnnnnnnnnnnnnnnnnnnnnnnnnnnnnnnnnnnnnnnnnnnnnnnnnnnnnnnnnnnnnnnnnnnnnnnnnnnnnnnnnnnnnnnnnnnnnnnnnnnnnnnnnnnnnnnnnnnnnnnnnnnnnnnnnnnnnnnnnnnnnnnnnnnnnnnnnnnnnnnnnnnnnnnnnnnnnnnnnnnnnnnnnnnnnnnnnnnnnnnnnnnnnnnnnnnnnnnnnnnnnnnnnnnnnnnnnnnnnnnnnnnnnnnnnnnnnnnnnnnnnnnnnnnnnnnnnnnnnnnnnnnnnnnnnnnnnnnnnnnnnnnnnnnnnnnnnnnnnnnnnnnnnnnnnnnnnnnnnnnnnnnnnnnnnnnnnnnnnnnnnnnnnnnnnnnnnnnnnnnnnnnnnnnnnnnnnnnnnnnnnnnnnnnnnnnnnnnnnnnnnnnnnnnnnnnnnnnnnnnnnnnnnnnnnnnnnnnnnnnnnnnnnnnnnnnnnnnnnnnnnnnnnnnnnnnnnnnnnnnnnnnnnnnnnnnnnnnnnnnnnnnnnnnnnnnnnnnnnnnnnnnnnnnnnnnnnnnnnnnnnnnnnnnnnnnnnnnnnnnnnnnnnnnnnnnnnnnnnnnnnnnnnnnnnnnnnnnnnnnnnnnnnnnnnnnnnnnnnnnnnnnnnnnnnnnnnnnnnnnnnnnnnnnnnnnnnnnnnnnnnnnnnnnnnnnnnnnnnnnnnnnnnnnnnnnnnnnnnnnnnnnnnnnnnnnnnnnnnnnnnnnnnnnnnnnnnnnnnnnnnnnnnnnnnnnnnnnnnnnnnnnnnnnnnnnnnnnnnnnnnnnnnnnnnnnnnnnnnnnnnnnnnnnnnnnnnnnnnnnnnnnnnnnnnnnnnnnnnnnnnnnnnnnnnnnnnnnnnnnnnnnnnnnnnnnnnnnnnnnnnnnnnnnnnnnnnnnnnnnnnnnnnnnnnnnnnnnnnnnnnnnnnnnnnnnnnnnnnnnnnnnnnnnnnnnnnnnnnnnnnnnnnnnnnnnnnnnnnnnnnnnnnnnnnnnnnnnnnnnnnnnnnnnnnnnnnnnnnnnnnnnnnnnnnnnnnnnnnnnnnnnnnnnnnnnnnnnnnnnnnnnnnnnnnnnnnnnnnnnnnnnnnnnnnnnnnnnnnnnnnnnnnnnnnnnnnnnnnnnnnnnnnnnnnnnnnnnnnnnnnnnnnnnnnnnnnnnnnnnnnnnnnnnnnnnnnnnnnnnnnnnnnnnnnnnnnnnnnnnnnnnnnnnnnnnnnnnnnnnnnnnnnnnnnnnnnnnnnnnnnnnnnnnnnnnnnnnnnnnnnnnnnnnnnnnnnnnnnnnnnnnnnnnnnnnnnnnnnnnnnnnnnnnnnnnnnnnnnnnnnnnnnnnnnnnnnnnnnnnnnnnnnnnnnnnnnnnnnnnnnnnnnnnnnnnnnnnnnnnnnnnnnnnnnnnnnnnnnnnnnnnnnnnnnnnnnnnnnnnnnnnnnnnnnnnnnnnnnnnnnnnnnnnnnnnnnnnnnnnnnnnnnnnnnnnnnnnnnnnnnnnnnnnnnnnnnnnnnnnnnnnnnnnnnnnnnnnnnnnnnnnnnnnnnnnnnnnnnnnnnnnnnnnnnnnnnnnnnnnnnnnnnnnnnnnnnnnnnnnnnnnnnnnnnnnnnnnnnnnnnnnnnnnnnnnnnnnnnnnnnnnnnnnnnnnnnnnnnnnnnnnnnnnnnnnnnnnnnnnnnnnnnnnnnnnnnnnnnnnnnnnnnnnnnnnnnnnnnnnnnnnnnnnnnnnnnnnnnnnnnnnnnnnnnnnnnnnnnnnnnnnnnnnnnnnnnnnnnnnnnnnnnnnnnnnnnnnnnnnnnnnnnnnnnnnnnnnnnnnnnnnnnnnnnnnnnnnnnnnnnnnnnnnnnnnnnnnnnnnnnnnnnnnnnnnnnnnnnnnnnnnnnnnnnnnnnnnnnnnnnnnnnnnnnnnnnnnnnnnnnnnnnnnnnnnnnnnnnnnnnnnnnnnnnnnnnnnnnnnnnnnnnnnnnnnnnnnnnnnnnnnnnnnnnnnnnnnnnnnnnnnnnnnnnnnnnnnnnnnnnnnnnnnnnnnnnnnnnnnnnnnnnnnnnnnnnnnnnnnnnnnnnnnnnnnnnnnnnnnnnnnnnnnnnnnnnnnnnnnnnnnnnnnnnnnnnnnnnnnnnnnnnnnnnnnnnnnnnnnnnnnnnnnnnnnnnnnnnnnnnnnnnnnnnnnnnnnnnnnnnnnnnnnnnnnnnnnnnnnnnnnnnnnnnnnnnnnnnnnnnnnnnnnnnnnnnnnnnnnnnnnnnnnnnnnnnnnnnnnnnnnnnnnnnnnnnnnnnnnnnnnnnnnnnnnnnnnnnnnnnnnnnnnnnnnnnnnnnnnnnnnnnnnnnnnnnnnnnnnnnnnnnnnnnnnnnnnnnnnnnnnnnnnnnnnnnnnnnnnnnnnnnnnnnnnnnnnnnnnnnnnnnnnnnnnnnnnnnnnnnnnnnnnnnnnnnnnnnnnnnnnnnnnnnnnnnnnnnnnnnnnnnnnnnnnnnnnnnnnnnnnnnnnnnnnnnnnnnnnnnnnnnnnnnnnnnnnnnnnnnnnnnnnnnnnnnnnnnnnnnnnnnnnnnnnnnnnnnnnnnnnnnnnnnnnnnnnnnnnnnnnnnnnnnnnnnnnnnnnnnnnnnnnnnnnnnnnnnnnnnnnnnnnnnnnnnnnnnnnnnnnnnnnnnnnnnnnnnnnnnnnnnnnnnnnnnnnnnnnnnnnnnnnnnnnnnnnnnnnnnnnnnnnnnnnnnnnnnnnnnnnnnnnnnnnnnnnnnnnnnnnnnnnnnnnnnnnnnnnnnnnnnnnnnnnnnnnnnnnnnnnnnnnnnnnnnnnnnnnnnnnnnnnnnnnnnnnnnnnnnnnnnnnnnnnnnnnnnnnnnnnnnnnnnnnnnnnnnnnnnnnnnnnnnnnnnnnnnnnnnnnnnnnnnnnnnnnnnnnnnnnnnnnnnnnnnnnnnnnnnnnnnnnnnnnnnnnnnnnnnnnnnnnnnnnnnnnnnnnnnnnnnnnnnnnnnnnnnnnnnnnnnnnnnnnnnnnnnnnnnnnnnnnnnnnnnnnnnnnnnnnnnnnnnnnnnnnnnnnnnnnnnnnnnnnnnnnnnnnnnnnnnnnnnnnnnnnnnnnnnnnnnnnnnnnnnnnnnnnnnnnnnnnnnnnnnnnnnnnnnnnnnnnnnnnnnnnnnnnnnnnnnnnnnnnnnnnnnnnnnnnnnnnnnnnnnnnnnnnnnnnnnnnnnnnnnnnnnnnnnnnnnnnnnnnnnnnnnnnnnnnnnnnnnnnnnnnnnnnnnnnnnnnnnnnnnnnnnnnnnnnnnnnnnnnnnnnnnnnnnnnnnnnnnnnnnnnnnnnnnnnnnnnnnnnnnnnnnnnnnnnnnnnnnnnnnnnnnnnnnnnnnnnnnnnnnnnnnnnnnnnnnnnnnnnnnnnnnnnnnnnnnnnnnnnnnnnnnnnnnnnnnnnnnnnnnnnnnnnnnnnnnnnnnnnnnnnnnnnnnnnnnnnnnnnnnnnnnnnnnnnnnnnnnnnnnnnnnnnnnnnnnnnnnnnnnnnnnnnnnnnnnnnnnnnnnnnnnnnnnnnnnnnnnnnnnnnnnnnnnnnnnnnnnnnnnnnnnnnnnnnnnnnnnnnnnnnnnnnnnnnnnnnnnnnnnnnnnnnnnnnnnnnnnnnnnnnnnnnnnnnnnnnnnnnnnnnnnnnnnnnnnnnnnnnnnnnnnnnnnnnnnnnnnnnnnnnnnnnnnnnnnnnnnnnnnnnnnnnnnnnnnnnnnnnnnnnnnnnnnnnnnnnnnnnnnnnnnnnnnnnnnnnnnnnnnnnnnnnnnnnnnnnnnnnnnnnnnnnnnnnnnnnnnnnnnnnnnnnnnnnnnnnnnnnnnnnnnnnnnnnnnnnnnnnnnnnnnnnnnnnnnnnnnnnnnnnnnnnnnnnnnnnnnnnnnnnnnnnnnnnnnnnnnnnnnnnnnnnnnnnnnnnnnnnnnnnnnnnnnnnnnnnnnnnnnnnnnnnnnnnnnnnnnnnnnnnnnnnnnnnnnnnnnnnnnnnnnnnnnnnnnnnnnnnnnnnnnnnnnnnnnnnnnnnnnnnnnnnnnnnnnnnnnnnnnnnnnnnnnnnnnnnnnnnnnnnnnnnnnnnnnnnnnnnnnnnnnnnnnnnnnnnnnnnnnnnnnnnnnnnnnnnnnnnnnnnnnnnnnnnnnnnnnnnnnnnnnnnnnnnnnnnnnnnnnnnnnnnnnnnnnnnnnnnnnnnnnnnnnnnnnnnnnnnnnnnnnnnnnnnnnnnnnnnnnnnnnnnnnnnnnnnnnnnnnnnnnnnnnnnnnnnnnnnnnnnnnnnnnnnnnnnnnnnnnnnnnnnnnnnnnnnnnnnnnnnnnnnnnnnnnnnnnnnnnnnnnnnnnnnnnnnnnnnnnnnnnnnnnnnnnnnnnnnnnnnnnnnnnnnnnnnnnnnnnnnnnnnnnnnnnnnnnnnnnnnnnnnnnnnnnnnnnnnnnnnnnnnnnnnnnnnnnnnnnnnnnnnnnnnnnnnnnnnnnnnnnnnnnnnnnnnnnnnnnnnnnnnnnnnnnnnnnnnnnnnnnnnnnnnnnnnnnnnnnnnnnnnnnnnnnnnnnnnnnnnnnnnnnnnnnnnnnnnnnnnnnnnnnnnnnnnnnnnnnnnnnnnnnnnnnnnnnnnnnnnnnnnnnnnnnnnnnnnnnnnnnnnnnnnnnnnnnnnnnnnnnnnnnnnnnnnnnnnnnnnnnnnnnnnnnnnnnnnnnnnnnnnnnnnnnnnnnnnnnnnnnnnnnnnnnnnnnnnnnnnnnnnnnnnnnnnnnnnnnnnnnnnnnnnnnnnnnnnnnnnnnnnnnnnnnnnnnnnnnnnnnnnnnnnnnnnnnnnnnnnnnnnnnnnnnnnnnnnnnnnnnnnnnnnnnnnnnnnnnnnnnnnnnnnnnnnnnnnnnnnnnnnnnnnnnnnnnnnnnnnnnnnnnnnnnnnnnnnnnnnnnnnnnnnnnnnnnnnnnnnnnnnnnnnnnnnnnnnnnnnnnnnnnnnnnnnnnnnnnnnnnnnnnnnnnnnnnnnnnnnnnnnnnnnnnnnnnnnnnnnnnnnnnnnnnnnnnnnnnnnnnnnnnnnnnnnnnnnnnnnnnnnnnnnnnnnnnnnnnnnnnnnnnnnnnnnnnnnnnnnnnnnnnnnnnnnnnnnnnnnnnnnnnnnnnnnnnnnnnnnnnnnnnnnnnnnnnnnnnnnnnnnnnnnnnnnnnnnnnnnnnnnnnnnnnnnnnnnnnnnnnnnnnnnnnnnnnnnnnnnnnnnnnnnnnnnnnnnnnnnnnnnnnnnnnnnnnnnnnnnnnnnnnnnnnnnnnnnnnnnnnnnnnnnnnnnnnnnnnnnnnnnnnnnnnnnnnnnnnnnnnnnnnnnnnnnnnnnnnnnnnnnnnnnnnnnnnnnnnnnnnnnnnnnnnnnnnnnnnnnnnnnnnnnnnnnnnnnnnnnnnnnnnnnnnnnnnnnnnnnnnnnnnnnnnnnnnnnnnnnnnnnnnnnnnnnnnnnnnnnnnnnnnnnnnnnnnnnnnnnnnnnnnnnnnnnnnnnnnnnnnnnnnnnnnnnnnnnnnnnnnnnnnnnnnnnnnnnnnnnnnnnnnnnnnnnnnnnnnnnnnnnnnnnnnnnnnnnnnnnnnnnnnnnnnnnnnnnnnnnnnnnnnnnnnnnnnnnnnnnnnnnnnnnnnnnnnnnnnnnnnnnnnnnnnnnnnnnnnnnnnnnnnnnnnnnnnnnnnnnnnnnnnnnnnnnnnnnnnnnnnnnnnnnnnnnnnnnnnnnnnnnnnnnnnnnnnnnnnnnnnnnnnnnnnnnnnnnnnnnnnnnnnnnnnnnnnnnnnnnnnnnnnnnnnnnnnnnnnnnnnnnnnnnnnnnnnnnnnnnnnnnnnnnnnnnnnnnnnnnnnnnnnnnnnnnnnnnnnnnnnnnnnnnnnnnnnnnnnnnnnnnnnnnnnnnnnnnnnnnnnnnnnnnnnnnnnnnnnnnnnnnnnnnnnnnnnnnnnnnnnnnnnnnnnnnnnnnnnnnnnnnnnnnnnnnnnnnnnnnnnnnnnnnnnnnnnnnnnnnnnnnnnnnnnnnnnnnnnnnnnnnnnnnnnnnnnnnnnnnnnnnnnnnnnnnnnnnnnnnnnnnnnnnnnnnnnnnnnnnnnnnnnnnnnnnnnnnnnnnnnnnnnnnnnnnnnnnnnnnnnnnnnnnnnnnnnnnnnnnnnnnnnnnnnnnnnnnnnnnnnnnnnnnnnnnnnnnnnnnnnnnnnnnnnnnnnnnnnnnnnnnnnnnnnnnnnnnnnnnnnnnnnnnnnnnnnnnnnnnnnnnnnnnnnnnnnnnnnnnnnnnnnnnnnnnnnnnnnnnnnnnnnnnnnnnnnnnnnnnnnnnnnnnnnnnnnnnnnnnnnnnnnnnnnnnnnnnnnnnnnnnnnnnnnnnnnnnnnnnnnnnnnnnnnnnnnnnnnnnnnnnnnnnnnnnnnnnnnnnnnnnnnnnnnnnnnnnnnnnnnnnnnnnnnnnnnnnnnnnnnnnnnnnnnnnnnnnnnnnnnnnnnnnnnnnnnnnnnnnnnnnnnnnnnnnnnnnnnnnnnnnnnnnnnnnnnnnnnnnnnnnnnnnnnnnnnnnnnnnnnnnnnnnnnnnnnnnnnnnnnnnnnnnnnnnnnnnnnnnnnnnnnnnnnnnnnnnnnnnnnnnnnnnnnnnnnnnnnnnnnnnnnnnnnnnnnnnnnnnnnnnnnnnnnnnnnnnnnnnnnnnnnnnnnnnnnnnnnnnnnnnnnnnnnnnnnnnnnnnnnnnnnnnnnnnnnnnnnnnnnnnnnnnnnnnnnnnnnnnnnnnnnnnnnnnnnnnnnnnnnnnnnnnnnnnnnnnnnnnnnnnnnnnnnnnnnnnnnnnnnnnnnnnnnnnnnnnnnnnnnnnnnnnnnnnnnnnnnnnnnnnnnnnnnnnnnnnnnnnnnnnnnnnnnnnnnnnnnnnnnnnnnnnnnnnnnnnnnnnnnnnnnnnnnnnnnnnnnnnnnnnnnnnnnnnnnnnnnnnnnnnnnnnnnnnnnnnnnnnnnnnnnnnnnnnnnnnnnnnnnnnnnnnnnnnnnnnnnnnnnnnnnnnnnnnnnnnnnnnnnnnnnnnnnnnnnnnnnnnnnnnnnnnnnnnnnnnnnnnnnnnnnnnnnnnnnnnnnnnnnnnnnnnnnnnnnnnnnnnnnnnnnnnnnnnnnnnnnnnnnnnnnnnnnnnnnnnnnnnnnnnnnnnnnnnnnnnnnnnnnnnnnnnnnnnnnnnnnnnnnnnnnnnnnnnnnnnnnnnnnnnnnnnnnnnnnnnnnnnnnnnnnnnnnnnnnnnnnnnnnnnnnnnnnnnnnnnnnnnnnnnnnnnnnnnnnnnnnnnnnnnnnnnnnnnnnnnnnnnnnnnnnnnnnnnnnnnnnnnnnnnnnnnnnnnnnnnnnnnnnnnnnnnnnnnnnnnnnnnnnnnnnnnnnnnnnnnnnnnnnnnnnnnnnnnnnnnnnnnnnnnnnnnnnnnnnnnnnnnnnnnnnnnnnnnnnnnnnnnnnnnnnnnnnnnnnnnnnnnnnnnnnnnnnnnnnnnnnnnnnnnnnnnnnnnnnnnnnnnnnnnnnnnnnnnnnnnnnnnnnnnnnnnnnnnnnnnnnnnnnnnnnnnnnnnnnnnnnnnnnnnnnnnnnnnnnnnnnnnnnnnnnnnnnnnnnnnnnnnnnnnnnnnnnnnnnnnnnnnnnnnnnnnnnnnnnnnnnnnnnnnnnnnnnnnnnnnnnnnnnnnnnnnnnnnnnnnnnnnnnnnnnnnnnnnnnnnnnnnnnnnnnnnnnnnnnnnnnnnnnnnnnnnnnnnnnnnnnnnnnnnnnnnnnnnnnnnnnnnnnnnnnnnnnnnnnnnnnnnnnnnnnnnnnnnnnnnnnnnnnnnnnnnnnnnnnnnnnnnnnnnnnnnnnnnnnnnnnnnnnnnnnnnnnnnnnnnnnnnnnnnnnnnnnnnnnnnnnnnnnnnnnnnnnnnnnnnnnnnnnnnnnnnnnnnnnnnnnnnnnnnnnnnnnnnnnnnnnnnnnnnnnnnnnnnnnnnnnnnnnnnnnnnnnnnnnnnnnnnnnnnnnnnnnnnnnnnnnnnnnnnnnnnnnnnnnnnnnnnnnnnnnnnnnnnnnnnnnnnnnnnnnnnnnnnnnnnnnnnnnnnnnnnnnnnnnnnnnnnnnnnnnnnnnnnnnnnnnnnnnnnnnnnnnnnnnnnnnnnnnnnnnnnnnnnnnnnnnnnnnnnnnnnnnnnnnnnnnnnnnnnnnnnnnnnnnnnnnnnnnnnnnnnnnnnnnnnnnnnnnnnnnnnnnnnnnnnnnnnnnnnnnnnnnnnnnnnnnnnnnnnnnnnnnnnnnnnnnnnnnnnnnnnnnnnnnnnnnnnnnnnnnnnnnnnnnnnnnnnnnnnnnnnnnnnnnnnnnnnnnnnnnnnnnnnnnnnnnnnnnnnnnnnnnnnnnnnnnnnnnnnnnnnnnnnnnnnnnnnnnnnnnnnnnnnnnnnnnnnnnnnnnnnnnnnnnnnnnnnnnnnnnnnnnnnnnnnnnnnnnnnnnnnnnnnnnnnnnnnnnnnnnnnnnnnnnnnnnnnnnnnnnnnnnnnnnnnnnnnnnnnnnnnnnnnnnnnnnnnnnnnnnnnnnnnnnnnnnnnnnnnnnnnnnnnnnnnnnnnnnnnnnnnnnnnnnnnnnnnnnnnnnnnnnnnnnnnnnnnnnnnnnnnnnnnnnnnnnnnnnnnnnnnnnnnnnnnnnnnnnnnnnnnnnnnnnnnnnnnnnnnnnnnnnnnnnnnnnnnnnnnnnnnnnnnnnnnnnnnnnnnnnnnnnnnnnnnnnnnnnnnnnnnnnnnnnnnnnnnnnnnnnnnnnnnnnnnnnnnnnnnnnnnnnnnnnnnnnnnnnnnnnnnnnnnnnnnnnnnnnnnnnnnnnnnnnnnnnnnnnnnnnnnnnnnnnnnnnnnnnnnnnnnnnnnnnnnnnnnnnnnnnnnnnnnnnnnnnnnnnnnnnnnnnnnnnnnnnnnnnnnnnnnnnnnnnnnnnnnnnnnnnnnnnnnnnnnnnnnnnnnnnnnnnnnnnnnnnnnnnnnnnnnnnnnnnnnnnnnnnnnnnnnnnnnnnnnnnnnnnnnnnnnnnnnnnnnnnnnnnnnnnnnnnnnnnnnnnnnnnnnnnnnnnnnnnnnnnnnnnnnnnnnnnnnnnnnnnnnnnnnnnnnnnnnnnnnnnnnnnnnnnnnnnnnnnnnnnnnnnnnnnnnnnnnnnnnnnnnnnnnnnnnnnnnnnnnnnnnnnnnnnnnnnnnnnnnnnnnnnnnnnnnnnnnnnnnnnnnnnnnnnnnnnnnnnnnnnnnnnnnnnnnnnnnnnnnnnnnnnnnnnnnnnnnnnnnnnnnnnnnnnnnnnnnnnnnnnnnnnnnnnnnnnnnnnnnnnnnnnnnnnnnnnnnnnnnnnnnnnnnnnnnnnnnnnnnnnnnnnnnnnnnnnnnnnnnnnnnnnnnnnnnnnnnnnnnnnnnnnnnnnnnnnnnnnnnnnnnnnnnnnnnnnnnnnnnnnnnnnnnnnnnnnnnnnnnnnnnnnnnnnnnnnnnnnnnnnnnnnnnnnnnnnnnnnnnnnnnnnnnnnnnnnnnnnnnnnnnnnnnnnnnnnnnnnnnnnnnnnnnnnnnnnnnnnnnnnnnnnnnnnnnnnnnnnnnnnnnnnnnnnnnnnnnnnnnnnnnnnnnnnnnnnnnnnnnnnnnnnnnnnnnnnnnnnnnnnnnnnnnnnnnnnnnnnnnnnnnnnnnnnnnnnnnnnnnnnnnnnnnnnnnnnnnnnnnnnnnnnnnnnnnnnnnnnnnnnnnnnnnnnnnnnnnnnnnnnnnnnnnnnnnnnnnnnnnnnnnnnnnnnnnnnnnnnnnnnnnnnnnnnnnnnnnnnnnnnnnnnnnnnnnnnnnnnnnnnnnnnnnnnnnnnnnnnnnnnnnnnnnnnnnnnnnnnnnnnnnnnnnnnnnnnnnnnnnnnnnnnnnnnnnnnnnnnnnnnnnnnnnnnnnnnnnnnnnnnnnnnnnnnnnnnnnnnnnnnnnnnnnnnnnnnnnnnnnnnnnnnnnnnnnnnnnnnnnnnnnnnnnnnnnnnnnnnnnnnnnnnnnnnnnnnnnnnnnnnnnnnnnnnnnnnnnnnnnnnnnnnnnnnnnnnnnnnnnnnnnnnnnnnnnnnnnnnnnnnnnnnnnnnnnnnnnnnnnnnnnnnnnnnnnnnnnnnnnnnnnnnnnnnnnnnnnnnnnnnnnnnnnnnnnnnnnnnnnnnnnnnnnnnnnnnnnnnnnnnnnnnnnnnnnnnnnnnnnnnnnnnnnnnnnnnnnnnnnnnnnnnnnnnnnnnnnnnnnnnnnnnnnnnnnnnnnnnnnnnnnnnnnnnnnnnnnnnnnnnnnnnnnnnnnnnnnnnnnnnnnnnnnnnnnnnnnnnnnnnnnnnnnnnnnnnnnnnnnnnnnnnnnnnnnnnnnnnnnnnnnnnnnnnnnnnnnnnnnnnnnnnnnnnnnnnnnnnnnnnnnnnnnnnnnnnnnnnnnnnnnnnnnnnnnnnnnnnnnnnnnnnnnnnnnnnnnnnnnnnnnnnnnnnnnnnnnnnnnnnnnnnnnnnnnnnnnnnnnnnnnnnnnnnnnnnnnnnnnnnnnnnnnnnnnnnnnnnnnnnnnnnnnnnnnnnnnnnnnnnnnnnnnnnnnnnnnnnnnnnnnnnnnnnnnnnnnnnnnnnnnnnnnnnnnnnnnnnnnnnnnnnnnnnnnnnnnnnnnnnnnnnnnnnnnnnnnnnnnnnnnnnnnnnnnnnnnnnnnnnnnnnnnnnnnnnnnnnnnnnnnnnnnnnnnnnnnnnnnnnnnnnnnnnnnnnnnnnnnnnnnnnnnnnnnnnnnnnnnnnnnnnnnnnnnnnnnnnnnnnnnnnnnnnnnnnnnnnnnnnnnnnnnnnnnnnnnnnnnnnnnnnnnnnnnnnnnnnnnnnnnnnnnnnnnnnnnnnnnnnnnnnnnnnnnnnnnnnnnnnnnnnnnnnnnnnnnnnnnnnnnnnnnnnnnnnnnnnnnnnnnnnnnnnnnnnnnnnnnnnnnnnnnnnnnnnnnnnnnnnnnnnnnnnnnnnnnnnnnnnnnnnnnnnnnnnnnnnnnnnnnnnnnnnnnnnnnnnnnnnnnnnnnnnnnnnnnnnnnnnnnnnnnnnnnnnnnnnnnnnnnnnnnnnnnnnnnnnnnnnnnnnnnnnnnnnnnnnnnnnnnnnnnnnnnnnnnnnnnnnnnnnnnnnnnnnnnnnnnnnnnnnnnnnnnnnnnnnnnnnnnnnnnnnnnnnnnnnnnnnnnnnnnnnnnnnnnnnnnnnnnnnnnnnnnnnnnnnnnnnnnnnnnnnnnnnnnnnnnnnnnnnnnnnnnnnnnnnnnnnnnnnnnnnnnnnnnnnnnnnnnnnnnnnnnnnnnnnnnnnnnnnnnnnnnnnnnnnnnnnnnnnnnnnnnnnnnnnnnnnnnnnnnnnnnnnnnnnnnnnnnnnnnnnnnnnnnnnnnnnnnnnnnnnnnnnnnnnnnnnnnnnnnnnnnnnnnnnnnnnnnnnnnnnnnnnnnnnnnnnnnnnnnnnnnnnnnnnnnnnnnnnnnnnnnnnnnnnnnnnnnnnnnnnnnnnnnnnnnnnnnnnnnnnnnnnnnnnnnnnnnnnnnnnnnnnnnnnnnnnnnnnnnnnnnnnnnnnnnnnnnnnnnnnnnnnnnnnnnnnnnnnnnnnnnnnnnnnnnnnnnnnnnnnnnnnnnnnnnnnnnnnnnnnnnnnnnnnnnnnnnnnnnnnnnnnnnnnnnnnnnnnnnnnnnnnnnnnnnnnnnnnnnnnnnnnnnnnnnnnnnnnnnnnnnnnnnnnnnnnnnnnnnnnnnnnnnnnnnnnnnnnnnnnnnnnnnnnnnnnnnnnnnnnnnnnnnnnnnnnnnnnnnnnnnnnnnnnnnnnnnnnnnnnnnnnnnnnnnnnnnnnnnnnnnnnnnnnnnnnnnnnnnnnnnnnnnnnnnnnnnnnnnnnnnnnnnnnnnnnnnnnnnnnnnnnnnnnnnnnnnnnnnnnnnnnnnnnnnnnnnnnnnnnnnnnnnnnnnnnnnnnnnnnnnnnnnnnnnnnnnnnnnnnnnnnnnnnnnnnnnnnnnnnnnnnnnnnnnnnnnnnnnnnnnnnnnnnnnnnnnnnnnnnnnnnnnnnnnnnnnnnnnnnnnnnnnnnnnnnnnnnnnnnnnnnnnnnnnnnnnnnnnnnnnnnnnnnnnnnnnnnnnnnnnnnnnnnnnnnnnnnnnnnnnnnnnnnnnnnnnnnnnnnnnnnnnnnnnnnnnnnnnnnnnnnnnnnnnnnnnnnnnnnnnnnnnnnnnnnnnnnnnnnnnnnnnnnnnnnnnnnnnnnnnnnnnnnnnnnnnnnnnnnnnnnnnnnnnnnnnnnnnnnnnnnnnnnnnnnnnnnnnnnnnnnnnnnnnnnnnnnnnnnnnnnnnnnnnnnnnnnnnnnnnnnnnnnnnnnnnnnnnnnnnnnnnnnnnnnnnnnnnnnnnnnnnnnnnnnnnnnnnnnnnnnnnnnnnnnnnnnnnnnnnnnnnnnnnnnnnnnnnnnnnnnnnnnnnnnnnnnnnnnnnnnnnnnnnnnnnnnnnnnnnnnnnnnnnnnnnnnnnnnnnnnnnnnnnnnnnnnnnnnnnnnnnnnnnnnnnnnnnnnnnnnnnnnnnnnnnnnnnnnnnnnnnnnnnnnnnnnnnnnnnnnnnnnnnnnnnnnnnnnnnnnnnnnnnnnnnnnnnnnnnnnnnnnnnnnnnnnnnnnnnnnnnnnnnnnnnnnnnnnnnnnnnnnnnnnnnnnnnnnnnnnnnnnnnnnnnnnnnnnnnnnnnnnnnnnnnnnnnnnnnnnnnnnnnnnnnnnnnnnnnnnnnnnnnnnnnnnnnnnnnnnnnnnnnnnnnnnnnnnnnnnnnnnnnnnnnnnnnnnnnnnnnnnnnnnnnnnnnnnnnnnnnnnnnnnnnnnnnnnnnnnnnnnnnnnnnnnnnnnnnnnnnnnnnnnnnnnnnnnnnnnnnnnnnnnnnnnnnnnnnnnnnnnnnnnnnnnnnnnnnnnnnnnnnnnnnnnnnnnnnnnnnnnnnnnnnnnnnnnnnnnnnnnnnnnnnnnnnnnnnnnnnnnnnnnnnnnnnnnnnnnnnnnnnnnnnnnnnnnnnnnnnnnnnnnnnnnnnnnnnnnnnnnnnnnnnnnnnnnnnnnnnnnnnnnnnnnnnnnnnnnnnnnnnnnnnnnnnnnnnnnnnnnnnnnnnnnnnnnnnnnnnnnnnnnnnnnnnnnnnnnnnnnnnnnnnnnnnnnnnnnnnnnnnnnnnnnnnnnnnnnnnnnnnnnnnnnnnnnnnnnnnnnnnnnnnnnnnnnnnnnnnnnnnnnnnnnnnnnnnnnnnnnnnnnnnnnnnnnnnnnnnnnnnnnnnnnnnnnnnnnnnnnnnnnnnnnnnnnnnnnnnnnnnnnnnnnnnnnnnnnnnnnnnnnnnnnnnnnnnnnnnnnnnnnnnnnnnnnnnnnnnnnnnnnnnnnnnnnnnnnnnnnnnnnnnnnnnnnnnnnnnnnnnnnnnnnnnnnnnnnnnnnnnnnnnnnnnnnnnnnnnnnnnnnnnnnnnnnnnnnnnnnnnnnnnnnnnnnnnnnnnnnnnnnnnnnnnnnnnnnnnnnnnnnnnnnnnnnnnnnnnnnnnnnnnnnnnnnnnnnnnnnnnnnnnnnnnnnnnnnnnnnnnnnnnnnnnnnnnnnnnnnnnnnnnnnnnnnnnnnnnnnnnnnnnnnnnnnnnnnnnnnnnnnnnnnnnnnnnnnnnnnnnnnnnnnnnnnnnnnnnnnnnnnnnnnnnnnnnnnnnnnnnnnnnnnnnnnnnnnnnnnnnnnnnnnnnnnnnnnnnnnnnnnnnnnnnnnnnnnnnnnnnnnnnnnnnnnnnnnnnnnnnnnnnnnnnnnnnnnnnnnnnnnnnnnnnnnnnnnnnnnnnnnnnnnnnnnnnnnnnnnnnnnnnnnnnnnnnnnnnnnnnnnnnnnnnnnnnnnnnnnnnnnnnnnnnnnnnnnnnnnnnnnnnnnnnnnnnnnnnnnnnnnnnnnnnnnnnnnnnnnnnnnnnnnnnnnnnnnnnnnnnnnnnnnnnnnnnnnnnnnnnnnnnnnnnnnnnnnnnnnnnnnnnnnnnnnnnnnnnnnnnnnnnnnnnnnnnnnnnnnnnnnnnnnnnnnnnnnnnnnnnnnnnnnnnnnnnnnnnnnnnnnnnnnnnnnnnnnnnnnnnnnnnnnnnnnnnnnnnnnnnnnnnnnnnnnnnnnnnnnnnnnnnnnnnnnnnnnnnnnnnnnnnnnnnnnnnnnnnnnnnnnnnnnnnnnnnnnnnnnnnnnnnnnnnnnnnnnnnnnnnnnnnnnnnnnnnnnnnnnnnnnnnnnnnnnnnnnnnnnnnnnnnnnnnnnnnnnnnnnnnnnnnnnnnnnnnnnnnnnnnnnnnnnnnnnnnnnnnnnnnnnnnnnnnnnnnnnnnnnnnnnnnnnnnnnnnnnnnnnnnnnnnnnnnnnnnnnnnnnnnnnnnnnnnnnnnnnnnnnnnnnnnnnnnnnnnnnnnnnnnnnnnnnnnnnnnnnnnnnnnnnnnnnnnnnnnnnnnnnnnnnnnnnnnnnnnnnnnnnnnnnnnnnnnnnnnnnnnnnnnnnnnnnnnnnnnnnnnnnnnnnnnnnnnnnnnnnnnnnnnnnnnnnnnnnnnnnnnnnnnnnnnnnnnnnnnnnnnnnnnnnnnnnnnnnnnnnnnnnnnnnnnnnnnnnnnnnnnnnnnnnnnnnnnnnnnnnnnnnnnnnnnnnnnnnnnnnnnnnnnnnnnnnnnnnnnnnnnnnnnnnnnnnnnnnnnnnnnnnnnnnnnnnnnnnnnnnnnnnnnnnnnnnnnnnnnnnnnnnnnnnnnnnnnnnnnnnnnnnnnnnnnnnnnnnnnnnnnnnnnnnnnnnnnnnnnnnnnnnnnnnnnnnnnnnnnnnnnnnnnnnnnnnnnnnnnnnnnnnnnnnnnnnnnnnnnnnnnnnnnnnnnnnnnnnnnnnnnnnnnnnnnnnnnnnnnnnnnnnnnnnnnnnnnnnnnnnnnnnnnnnnnnnnnnnnnnnnnnnnnnnnnnnnnnnnnnnnnnnnnnnnnnnnnnnnnnnnnnnnnnnnnnnnnnnnnnnnnnnnnnnnnnnnnnnnnnnnnnnnnnnnnnnnnnnnnnnnnnnnnnnnnnnnnnnnnnnnnnnnnnnnnnnnnnnnnnnnnnnnnnnnnnnnnnnnnnnnnnnnnnnnnnnnnnnnnnnnnnnnnnnnnnnnnnnnnnnnnnnnnnnnnnnnnnnnnnnnnnnnnnnnnnnnnnnnnnnnnnnnnnnnnnnnnnnnnnnnnnnnnnnnnnnnnnnnnnnnnnnnnnnnnnnnnnnnnnnnnnnnnnnnnnnnnnnnnnnnnnnnnnnnnnnnnnnnnnnnnnnnnnnnnnnnnnnnnnnnnnnnnnnnnnnnnnnnnnnnnnnnnnnnnnnnnnnnnnnnnnnnnnnnnnnnnnnnnnnnnnnnnnnnnnnnnnnnnnnnnnnnnnnnnnnnnnnnnnnnnnnnnnnnnnnnnnnnnnnnnnnnnnnnnnnnnnnnnnnnnnnnnnnnnnnnnnnnnnnnnnnnnnnnnnnnnnnnnnnnnnnnnnnnnnnnnnnnnnnnnnnnnnnnnnnnnnnnnnnnnnnnnnnnnnnnnnnnnnnnnnnnnnnnnnnnnnnnnnnnnnnnnnnnnnnnnnnnnnnnnnnnnnnnnnnnnnnnnnnnnnnnnnnnnnnnnnnnnnnnnnnnnnnnnnnnnnnnnnnnnnnnnnnnnnnnnnnnnnnnnnnnnnnnnnnnnnnnnnnnnnnnnnnnnnnnnnnnnnnnnnnnnnnnnnnnnnnnnnnnnnnnnnnnnnnnnnnnnnnnnnnnnnnnnnnnnnnnnnnnnnnnnnnnnnnnnnnnnnnnnnnnnnnnnnnnnnnnnnnnnnnnnnnnnnnnnnnnnnnnnnnnnnnnnnnnnnnnnnnnnnnnnnnnnnnnnnnnnnnnnnnnnnnnnnnnnnnnnnnnnnnnnnnnnnnnnnnnnnnnnnnnnnnnnnnnnnnnnnnnnnnnnnnnnnnnnnnnnnnnnnnnnnnnnnnnnnnnnnnnnnnnnnnnnnnnnnnnnnnnnnnnnnnnnnnnnnnnnnnnnnnnnnnnnnnnnnnnnnnnnnnnnnnnnnnnnnnnnnnnnnnnnnnnnnnnnnnnnnnnnnnnnnnnnnnnnnnnnnnnnnnnnnnnnnnnnnnnnnnnnnnnnnnnnnnnnnnnnnnnnnnnnnnnnnnnnnnnnnnnnnnnnnnnnnnnnnnnnnnnnnnnnnnnnnnnnnnnnnnnnnnnnnnnnnnnnnnnnnnnnnnnnnnnnnnnnnnnnnnnnnnnnnnnnnnnnnnnnnnnnnnnnnnnnnnnnnnnnnnnnnnnnnnnnnnnnnnnnnnnnnnnnnnnnnnnnnnnnnnnnnnnnnnnnnnnnnnnnnnnnnnnnnnnnnnnnnnnnnnnnnnnnnnnnnnnnnnnnnnnnnnnnnnnnnnnnnnnnnnnnnnnnnnnnnnnnnnnnnnnnnnnnnnnnnnnnnnnnnnnnnnnnnnnnnnnnnnnnnnnnnnnnnnnnnnnnnnnnnnnnnnnnnnnnnnnnnnnnnnnnnnnnnnnnnnnnnnnnnnnnnnnnnnnnnnnnnnnnnnnnnnnnnnnnnnnnnnnnnnnnnnnnnnnnnnnnnnnnnnnnnnnnnnnnnnnnnnnnnnnnnnnnnnnnnnnnnnnnnnnnnnnnnnnnnnnnnnnnnnnnnnnnnnnnnnnnnnnnnnnnnnnnnnnnnnnnnnnnnnnnnnnnnnnnnnnnnnnnnnnnnnnnnnnnnnnnnnnnnnnnnnnnnnnnnnnnnnnnnnnnnnnnnnnnnnnnnnnnnnnnnnnnnnnnnnnnnnnnnnnnnnnnnnnnnnnnnnnnnnnnnnnnnnnnnnnnnnnnnnnnnnnnnnnnnnnnnnnnnnnnnnnnnnnnnnnnnnnnnnnnnnnnnnnnnnnnnnnnnnnnnnnnnnnnnnnnnnnnnnnnnnnnnnnnnnnnnnnnnnnnnnnnnnnnnnnnnnnnnnnnnnnnnnnnnnnnnnnnnnnnnnnnnnnnnnnnnnnnnnnnnnnnnnnnnnnnnnnnnnnnnnnnnnnnnnnnnnnnnnnnnnnnnnnnnnnnnnnnnnnnnnnnnnnnnnnnnnnnnnnnnnnnnnnnnnnnnnnnnnnnnnnnnnnnnnnnnnnnnnnnnnnnnnnnnnnnnnnnnnnnnnnnnnnnnnnnnnnnnnnnnnnnnnnnnnnnnnnnnnnnnnnnnnnnnnnnnnnnnnnnnnnnnnnnnnnnnnnnnnnnnnnnnnnnnnnnnnnnnnnnnnnnnnnnnnnnnnnnnnnnnnnnnnnnnnnnnnnnnnnnnnnnnnnnnnnnnnnnnnnnnnnnnnnnnnnnnnnnnnnnnnnnnnnnnnnnnnnnnnnnnnnnnnnnnnnnnnnnnnnnnnnnnnnnnnnnnnnnnnnnnnnnnnnnnnnnnnnnnnnnnnnnnnnnnnnnnnnnnnnnnnnnnnnnnnnnnnnnnnnnnnnnnnnnnnnnnnnnnnnnnnnnnnnnnnnnnnnnnnnnnnnnnnnnnnnnnnnnnnnnnnnnnnnnnnnnnnnnnnnnnnnnnnnnnnnnnnnnnnnnnnnnnnnnnnnnnnnnnnnnnnnnnnnnnnnnnnnnnnnnnnnnnnnnnnnnnnnnnnnnnnnnnnnnnnnnnnnnnnnnnnnnnnnnnnnnnnnnnnnnnnnnnnnnnnnnnnnnnnnnnnnnnnnnnnnnnnnnnnnnnnnnnnnnnnnnnnnnnnnnnnnnnnnnnnnnnnnnnnnnnnnnnnnnnnnnnnnnnnnnnnnnnnnnnnnnnnnnnnnnnnnnnnnnnnnnnnnnnnnnnnnnnnnnnnnnnnnnnnnnnnnnnnnnnnnnnnnnnnnnnnnnnnnnnnnnnnnnnnnnnnnnnnnnnnnnnnnnnnnnnnnnnnnnnnnnnnnnnnnnnnnnnnnnnnnnnnnnnnnnnnnnnnnnnnnnnnnnnnnnnnnnnnnnnnnnnnnnnnnnnnnnnnnnnnnnnnnnnnnnnnnnnnnnnnnnnnnnnnnnnnnnnnnnnnnnnnnnnnnnnnnnnnnnnnnnnnnnnnnnnnnnnnnnnnnnnnnnnnnnnnnnnnnnnnnnnnnnnnnnnnnnnnnnnnnnnnnnnnnnnnnnnnnnnnnnnnnnnnnnnnnnnnnnnnnnnnnnnnnnnnnnnnnnnnnnnnnnnnnnnnnnnnnnnnnnnnnnnnnnnnnnnnnnnnnnnnnnnnnnnnnnnnnnnnnnnnnnnnnnnnnnnnnnnnnnnnnnnnnnnnnnnnnnnnnnnnnnnnnnnnnnnnnnnnnnnnnnnnnnnnnnnnnnnnnnnnnnnnnnnnnnnnnnnnnnnnnnnnnnnnnnnnnnnnnnnnnnnnnnnnnnnnnnnnnnnnnnnnnnnnnnnnnnnnnnnnnnnnnnnnnnnnnnnnnnnnnnnnnnnnnnnnnnnnnnnnnnnnnnnnnnnnnnnnnnnnnnnnnnnnnnnnnnnnnnnnnnnnnnnnnnnnnnnnnnnnnnnnnnnnnnnnnnnnnnnnnnnnnnnnnnnnnnnnnnnnnnnnnnnnnnnnnnnnnnnnnnnnnnnnnnnnnnnnnnnnnnnnnnnnnnnnnnnnnnnnnnnnnnnnnnnnnnnnnnnnnnnnnnnnnnnnnnnnnnnnnnnnnnnnnnnnnnnnnnnnnnnnnnnnnnnnnnnnnnnnnnnnnnnnnnnnnnnnnnnnnnnnnnnnnnnnnnnnnnnnnnnnnnnnnnnnnnnnnnnnnnnnnnnnnnnnnnnnnnnnnnnnnnnnnnnnnnnnnnnnnnnnnnnnnnnnnnnnnnnnnnnnnnnnnnnnnnnnnnnnnnnnnnnnnnnnnnnnnnnnnnnnnnnnnnnnnnnnnnnnnnnnnnnnnnnnnnnnnnnnnnnnnnnnnnnnnnnnnnnnnnnnnnnnnnnnnnnnnnnnnnnnnnnnnnnnnnnnnnnnnnnnnnnnnnnnnnnnnnnnnnnnnnnnnnnnnnnnnnnnnnnnnnnnnnnnnnnnnnnnnnnnnnnnnnnnnnnnnnnnnnnnnnnnnnnnnnnnnnnnnnnnnnnnnnnnnnnnnnnnnnnnnnnnnnnnnnnnnnnnnnnnnnnnnnnnnnnnnnnnnnnnnnnnnnnnnnnnnnnnnnnnnnnnnnnnnnnnnnnnnnnnnnnnnnnnnnnnnnnnnnnnnnnnnnnnnnnnnnnnnnnnnnnnnnnnnnnnnnnnnnnnnnnnnnnnnnnnnnnnnnnnnnnnnnnnnnnnnnnnnnnnnnnnnnnnnnnnnnnnnnnnnnnnnnnnnnnnnnnnnnnnnnnnnnnnnnnnnnnnnnnnnnnnnnnnnnnnnnnnnnnnnnnnnnnnnnnnnnnnnnnnnnnnnnnnnnnnnnnnnnnnnnnnnnnnnnnnnnnnnnnnnnnnnnnnnnnnnnnnnnnnnnnnnnnnnnnnnnnnnnnnnnnnnnnnnnnnnnnnnnnnnnnnnnnnnnnnnnnnnnnnnnnnnnnnnnnnnnnnnnnnnnnnnnnnnnnnnnnnnnnnnnnnnnnnnnnnnnnnnnnnnnnnnnnnnnnnnnnnnnnnnnnnnnnnnnnnnnnnnnnnnnnnnnnnnnnnnnnnnnnnnnnnnnnnnnnnnnnnnnnnnnnnnnnnnnnnnnnnnnnnnnnnnnnnnnnnnnnnnnnnnnnnnnnnnnnnnnnnnnnnnnnnnnnnnnnnnnnnnnnnnnnnnnnnnnnnnnnnnnnnnnnnnnnnnnnnnnnnnnnnnnnnnnnnnnnnnnnnnnnnnnnnnnnnnnnnnnnnnnnnnnnnnnnnnnnnnnnnnnnnnnnnnnnnnnnnnnnnnnnnnnnnnnnnnnnnnnnnnnnnnnnnnnnnnnnnnnnnnnnnnnnnnnnnnnnnnnnnnnnnnnnnnnnnnnnnnnnnnnnnnnnnnnnnnnnnnnnnnnnnnnnnnnnnnnnnnnnnnnnnnnnnnnnnnnnnnnnnnnnnnnnnnnnnnnnnnnnnnnnnnnnnnnnnnnnnnnnnnnnnnnnnnnnnnnnnnnnnnnnnnnnnnnnnnnnnnnnnnnnnnnnnnnnnnnnnnnnnnnnnnnnnnnnnnnnnnnnnnnnnnnnnnnnnnnnnnnnnnnnnnnnnnnnnnnnnnnnnnnnnnnnnnnnnnnnnnnnnnnnnnnnnnnnnnnnnnnnnnnnnnnnnnnnnnnnnnnnnnnnnnnnnnnnnnnnnnnnnnnnnnnnnnnnnnnnnnnnnnnnnnnnnnnnnnnnnnnnnnnnnnnnnnnnnnnnnnnnnnnnnnnnnnnnnnnnnnnnnnnnnnnnnnnnnnnnnnnnnnnnnnnnnnnnnnnnnnnnnnnnnnnnnnnnnnnnnnnnnnnnnnnnnnnnnnnnnnnnnnnnnnnnnnnnnnnnnnnnnnnnnnnnnnnnnnnnnnnnnnnnnnnnnnnnnnnnnnnnnnnnnnnnnnnnnnnnnnnnnnnnnnnnnnnnnnnnnnnnnnnnnnnnnnnnnnnnnnnnnnnnnnnnnnnnnnnnnnnnnnnnnnnnnnnnnnnnnnnnnnnnnnnnnnnnnnnnnnnnnnnnnnnnnnnnnnnnnnnnnnnnnnnnnnnnnnnnnnnnnnnnnnnnnnnnnnnnnnnnnnnnnnnnnnnnnnnnnnnnnnnnnnnnnnnnnnnnnnnnnnnnnnnnnnnnnnnnnnnnnnnnnnnnnnnnnnnnnnnnnnnnnnnnnnnnnnnnnnnnnnnnnnnnnnnnnnnnnnnnnnnnnnnnnnnnnnnnnnnnnnnnnnnnnnnnnnnnnnnnnnnnnnnnnnnnnnnnnnnnnnnnnnnnnnnnnnnnnnnnnnnnnnnnnnnnnnnnnnnnnnnnnnnnnnnnnnnnnnnnnnnnnnnnnnnnnnnnnnnnnnnnnnnnnnnnnnnnnnnnnnnnnnnnnnnnnnnnnnnnnnnnnnnnnnnnnnnnnnnnnnnnnnnnnnnnnnnnnnnnnnnnnnnnnnnnnnnnnnnnnnnnnnnnnnnnnnnnnnnnnnnnnnnnnnnnnnnnnnnnnnnnnnnnnnnnnnnnnnnnnnnnnnnnnnnnnnnnnnnnnnnnnnnnnnnnnnnnnnnnnnnnnnnnnnnnnnnnnnnnnnnnnnnnnnnnnnnnnnnnnnnnnnnnnnnnnnnnnnnnnnnnnnnnnnnnnnnnnnnnnnnnnnnnnnnnnnnnnnnnnnnnnnnnnnnnnnnnnnnnnnnnnnnnnnnnnnnnnnnnnnnnnnnnnnnnnnnnnnnnnnnnnnnnnnnnnnnnnnnnnnnnnnnnnnnnnnnnnnnnnnnnnnnnnnnnnnnnnnnnnnnnnnnnnnnnnnnnnnnnnnnnnnnnnnnnnnnnnnnnnnnnnnnnnnnnnnnnnnnnnnnnnnnnnnnnnnnnnnnnnnnnnnnnnnnnnnnnnnnnnnnnnnnnnnnnnnnnnnnnnnnnnnnnnnnnnnnnnnnnnnnnnnnnnnnnnnnnnnnnnnnnnnnnnnnnnnnnnnnnnnnnnnnnnnnnnnnnnnnnnnnnnnnnnnnnnnnnnnnnnnnnnnnnnnnnnnnnnnnnnnnnnnnnnnnnnnnnnnnnnnnnnnnnnnnnnnnnnnnnnnnnnnnnnnnnnnnnnnnnnnnnnnnnnnnnnnnnnnnnnnnnnnnnnnnnnnnnnnnnnnnnnnnnnnnnnnnnnnnnnnnnnnnnnnnnnnnnnnnnnnnnnnnnnnnnnnnnnnnnnnnnnnnnnnnnnnnnnnnnnnnnnnnnnnnnnnnnnnnnnnnnnnnnnnnnnnnnnnnnnnnnnnnnnnnnnnnnnnnnnnnnnnnnnnnnnnnnnnnnnnnnnnnnnnnnnnnnnnnnnnnnnnnnnnnnnnnnnnnnnnnnnnnnnnnnnnnnnnnnnnnnnnnnnnnnnnnnnnnnnnnnnnnnnnnnnnnnnnnnnnnnnnnnnnnnnnnnnnnnnnnnnnnnnnnnnnnnnnnnnnnnnnnnnnnnnnnnnnnnnnnnnnnnnnnnnnnnnnnnnnnnnnnnnnnnnnnnnnnnnnnnnnnnnnnnnnnnnnnnnnnnnnnnnnnnnnnnnnnnnnnnnnnnnnnnnnnnnnnnnnnnnnnnnnnnnnnnnnnnnnnnnnnnnnnnnnnnnnnnnnnnnnnnnnnnnnnnnnnnnnnnnnnnnnnnnnnnnnnnnnnnnnnnnnnnnnnnnnnnnnnnnnnnnnnnnnnnnnnnnnnnnnnnnnnnnnnnnnnnnnnnnnnnnnnnnnnnnnnnnnnnnnnnnnnnnnnnnnnnnnnnnnnnnnnnnnnnnnnnnnnnnnnnnnnnnnnnnnnnnnnnnnnnnnnnnnnnnnnnnnnnnnnnnnnnnnnnnnnnnnnnnnnnnnnnnnnnnnnnnnnnnnnnnnnnnnnnnnnnnnnnnnnnnnnnnnnnnnnnnnnnnnnnnnnnnnnnnnnnnnnnnnnnnnnnnnnnnnnnnnnnnnnnnnnnnnnnnnnnnnnnnnnnnnnnnnnnnnnnnnnnnnnnnnnnnnnnnnnnnnnnnnnnnnnnnnnnnnnnnnnnnnnnnnnnnnnnnnnnnnnnnnnnnnnnnnnnnnnnnnnnnnnnnnnnnnnnnnnnnnnnnnnnnnnnnnnnnnnnnnnnnnnnnnnnnnnnnnnnnnnnnnnnnnnnnnnnnnnnnnnnnnnnnnnnnnnnnnnnnnnnnnnnnnnnnnnnnnnnnnnnnnnnnnnnnnnnnnnnnnnnnnnnnnnnnnnnnnnnnnnnnnnnnnnnnnnnnnnnnnnnnnnnnnnnnnnnnnnnnnnnnnnnnnnnnnnnnnnnnnnnnnnnnnnnnnnnnnnnnnnnnnnnnnnnnnnnnnnnnnnnnnnnnnnnnnnnnnnnnnnnnnnnnnnnnnnnnnnnnnnnnnnnnnnnnnnnnnnnnnnnnnnnnnnnnnnnnnnnnnnnnnnnnnnnnnnnnnnnnnnnnnnnnnnnnnnnnnnnnnnnnnnnnnnnnnnnnnnnnnnnnnnnnnnnnnnnnnnnnnnnnnnnnnnnnnnnnnnnnnnnnnnnnnnnnnnnnnnnnnnnnnnnnnnnnnnnnnnnnnnnnnnnnnnnnnnnnnnnnnnnnnnnnnnnnnnnnnnnnnnnnnnnnnnnnnnnnnnnnnnnnnnnnnnnnnnnnnnnnnnnnnnnnnnnnnnnnnnnnnnnnnnnnnnnnnnnnnnnnnnnnnnnnnnnnnnnnnnnnnnnnnnnnnnnnnnnnnnnnnnnnnnnnnnnnnnnnnnnnnnnnnnnnnnnnnnnnnnnnnnnnnnnnnnnnnnnnnnnnnnnnnnnnnnnnnnnnnnnnnnnnnnnnnnnnnnnnnnnnnnnnnnnnnnnnnnnnnnnnnnnnnnnnnnnnnnnnnnnnnnnnnnnnnnnnnnnnnnnnnnnnnnnnnnnnnnnnnnnnnnnnnnnnnnnnnnnnnnnnnnnnnnnnnnnnnnnnnnnnnnnnnnnnnnnnnnnnnnnnnnnnnnnnnnnnnnnnnnnnnnnnnnnnnnnnnnnnnnnnnnnnnnnnnnnnnnnnnnnnnnnnnnnnnnnnnnnnnnnnnnnnnnnnnnnnnnnnnnnnnnnnnnnnnnnnnnnnnnnnnnnnnnnnnnnnnnnnnnnnnnnnnnnnnnnnnnnnnnnnnnnnnnnnnnnnnnnnnnnnnnnnnnnnnnnnnnnnnnnnnnnnnnnnnnnnnnnnnnnnnnnnnnnnnnnnnnnnnnnnnnnnnnnnnnnnnnnnnnnnnnnnnnnnnnnnnnnnnnnnnnnnnnnnnnnnnnnnnnnnnnnnnnnnnnnnnnnnnnnnnnnnnnnnnnnnnnnnnnnnnnnnnnnnnnnnnnnnnnnnnnnnnnnnnnnnnnnnnnnnnnnnnnnnnnnnnnnnnnnnnnnnnnnnnnnnnnnnnnnnnnnnnnnnnnnnnnnnnnnnnnnnnnnnnnnnnnnnnnnnnnnnnnnnnnnnnnnnnnnnnnnnnnnnnnnnnnnnnnnnnnnnnnnnnnnnnnnnnnnnnnnnnnnnnnnnnnnnnnnnnnnnnnnnnnnnnnnnnnnnnnnnnnnnnnnnnnnnnnnnnnnnnnnnnnnnnnnnnnnnnnnnnnnnnnnnnnnnnnnnnnnnnnnnnnnnnnnnnnnnnnnnnnnnnnnnnnnnnnnnnnnnnnnnnnnnnnnnnnnnnnnnnnnnnnnnnnnnnnnnnnnnnnnnnnnnnnnnnnnnnnnnnnnnnnnnnnnnnnnnnnnnnnnnnnnnnnnnnnnnnnnnnnnnnnnnnnnnnnnnnnnnnnnnnnnnnnnnnnnnnnnnnnnnnnnnnnnnnnnnnnnnnnnnnnnnnnnnnnnnnnnnnnnnnnnnnnnnnnnnnnnnnnnnnnnnnnnnnnnnnnnnnnnnnnnnnnnnnnnnnnnnnnnnnnnnnnnnnnnnnnnnnnnnnnnnnnnnnnnnnnnnnnnnnnnnnnnnnnnnnnnnnnnnnnnnnnnnnnnnnnnnnnnnnnnnnnnnnnnnnnnnnnnnnnnnnnnnnnnnnnnnnnnnnnnnnnnnnnnnnnnnnnnnnnnnnnnnnnnnnnnnnnnnnnnnnnnnnnnnnnnnnnnnnnnnnnnnnnnnnnnnnnnnnnnnnnnnnnnnnnnnnnnnnnnnnnnnnnnnnnnnnnnnnnnnnnnnnnnnnnnnnnnnnnnnnnnnnnnnnnnnnnnnnnnnnnnnnnnnnnnnnnnnnnnnnnnnnnnnnnnnnnnnnnnnnnnnnnnnnnnnnnnnnnnnnnnnnnnnnnnnnnnnnnnnnnnnnnnnnnnnnnnnnnnnnnnnnnnnnnnnnnnnnnnnnnnnnnnnnnnnnnnnnnnnnnnnnnnnnnnnnnnnnnnnnnnnnnnnnnnnnnnnnnnnnnnnnnnnnnnnnnnnnnnnnnnnnnnnnnnnnnnnnnnnnnnnnnnnnnnnnnnnnnnnnnnnnnnnnnnnnnnnnnnnnnnnnnnnnnnnnnnnnnnnnnnnnnnnnnnnnnnnnnnnnnnnnnnnnnnnnnnnnnnnnnnnnnnnnnnnnnnnnnnnnnnnnnnnnnnnnnnnnnnnnnnnnnnnnnnnnnnnnnnnnnnnnnnnnnnnnnnnnnnnnnnnnnnnnnnnnnnnnnnnnnnnnnnnnnnnnnnnnnnnnnnnnnnnnnnnnnnnnnnnnnnnnnnnnnnnnnnnnnnnnnnnnnnnnnnnnnnnnnnnnnnnnnnnnnnnnnnnnnnnnnnnnnnnnnnnnnnnnnnnnnnnnnnnnnnnnnnnnnnnnnnnnnnnnnnnnnnnnnnnnnnnnnnnnnnnnnnnnnnnnnnnnnnnnnnnnnnnnnnnnnnnnnnnnnnnnnnnnnnnnnnnnnnnnnnnnnnnnnnnnnnnnnnnnnnnnnnnnnnnnnnnnnnnnnnnnnnnnnnnnnnnnnnnnnnnnnnnnnnnnnnnnnnnnnnnnnnnnnnnnnnnnnnnnnnnnnnnnnnnnnnnnnnnnnnnnnnnnnnnnnnnnnnnnnnnnnnnnnnnnnnnnnnnnnnnnnnnnnnnnnnnnnnnnnnnnnnnnnnnnnnnnnnnnnnnnnnnnnnnnnnnnnnnnnnnnnnnnnnnnnnnnnnnnnnnnnnnnnnnnnnnnnnnnnnnnnnnnnnnnnnnnnnnnnnnnnnnnnnnnnnnnnnnnnnnnnnnnnnnnnnnnnnnnnnnnnnnnnnnnnnnnnnnnnnnnnnnnnnnnnnnnnnnnnnnnnnnnnnnnnnnnnnnnnnnnnnnnnnnnnnnnnnnnnnnnnnnnnnnnnnnnnnnnnnnnnnnnnnnnnnnnnnnnnnnnnnnnnnnnnnnnnnnnnnnnnnnnnnnnnnnnnnnnnnnnnnnnnnnnnnnnnnnnnnnnnnnnnnnnnnnnnnnnnnnnnnnnnnnnnnnnnnnnnnnnnnnnnnnnnnnnnnnnnnnnnnnnnnnnnnnnnnnnnnnnnnnnnnnnnnnnnnnnnnnnnnnnnnnnnnnnnnnnnnnnnnnnnnnnnnnnnnnnnnnnnnnnnnnnnnnnnnnnnnnnnnnnnnnnnnnnnnnnnnnnnnnnnnnnnnnnnnnnnnnnnnnnnnnnnnnnnnnnnnnnnnnnnnnnnnnnnnnnnnnnnnnnnnnnnnnnnnnnnnnnnnnnnnnnnnnnnnnnnnnnnnnnnnnnnnnnnnnnnnnnnnnnnnnnnnnnnnnnnnnnnnnnnnnnnnnnnnnnnnnnnnnnnnnnnnnnnnnnnnnnnnnnnnnnnnnnnnnnnnnnnnnnnnnnnnnnnnnnnnnnnnnnnnnnnnnnnnnnnnnnnnnnnnnnnnnnnnnnnnnnnnnnnnnnnnnnnnnnnnnnnnnnnnnnnnnnnnnnnnnnnnnnnnnnnnnnnnnnnnnnnnnnnnnnnnnnnnnnnnnnnnnnnnnnnnnnnnnnnnnnnnnnnnnnnnnnnnnnnnnnnnnnnnnnnnnnnnnnnnnnnnnnnnnnnnnnnnnnnnnnnnnnnnnnnnnnnnnnnnnnnnnnnnnnnnnnnnnnnnnnnnnnnnnnnnnnnnnnnnnnnnnnnnnnnnnnnnnnnnnnnnnnnnnnnnnnnnnnnnnnnnnnnnnnnnnnnnnnnnnnnnnnnnnnnnnnnnnnnnnnnnnnnnnnnnnnnnnnnnnnnnnnnnnnnnnnnnnnnnnnnnnnnnnnnnnnnnnnnnnnnnnnnnnnnnnnnnnnnnnnnnnnnnnnnnnnnnnnnnnnnnnnnnnnnnnnnnnnnnnnnnnnnnnnnnnnnnnnnnnnnnnnnnnnnnnnnnnnnnnnnnnnnnnnnnnnnnnnnnnnnnnnnnnnnnnnnnnnnnnnnnnnnnnnnnnnnnnnnnnnnnnnnnnnnnnnnnnnnnnnnnnnnnnnnnnnnnnnnnnnnnnnnnnnnnnnnnnnnnnnnnnnnnnnnnnnnnnnnnnnnnnnnnnnnnnnnnnnnnnnnnnnnnnnnnnnnnnnnnnnnnnnnnnnnnnnnnnnnnnnnnnnnnnnnnnnnnnnnnnnnnnnnnnnnnnnnnnnnnnnnnnnnnnnnnnnnnnnnnnnnnnnnnnnnnnnnnnnnnnnnnnnnnnnnnnnnnnnnnnnnnnnnnnnnnnnnnnnnnnnnnnnnnnnnnnnnnnnnnnnnnnnnnnnnnnnnnnnnnnnnnnnnnnnnnnnnnnnnnnnnnnnnnnnnnnnnnnnnnnnnnnnnnnnnnnnnnnnnnnnnnnnnnnnnnnnnnnnnnnnnnnnnnnnnnnnnnnnnnnnnnnnnnnnnnnnnnnnnnnnnnnnnnnnnnnnnnnnnnnnnnnnnnnnnnnnnnnnnnnnnnnnnnnnnnnnnnnnnnnnnnnnnnnnnnnnnnnnnnnnnnnnnnnnnnnnnnnnnnnnnnnnnnnnnnnnnnnnnnnnnnnnnnnnnnnnnnnnnnnnnnnnnnnnnnnnnnnnnnnnnnnnnnnnnnnnnnnnnnnnnnnnnnnnnnnnnnnnnnnnnnnnnnnnnnnnnnnnnnnnnnnnnnnnnnnnnnnnnnnnnnnnnnnnnnnnnnnnnnnnnnnnnnnnnnnnnnnnnnnnnnnnnnnnnnnnnnnnnnnnnnnnnnnnnnnnnnnnnnnnnnnnnnnnnnnnnnnnnnnnnnnnnnnnnnnnnnnnnnnnnnnnnnnnnnnnnnnnnnnnnnnnnnnnnnnnnnnnnnnnnnnnnnnnnnnnnnnnnnnnnnnnnnnnnnnnnnnnnnnnnnnnnnnnnnnnnnnnnnnnnnnnnnnnnnnnnnnnnnnnnnnnnnnnnnnnnnnnnnnnnnnnnnnnnnnnnnnnnnnnnnnnnnnnnnnnnnnnnnnnnnnnnnnnnnnnnnnnnnnnnnnnnnnnnnnnnnnnnnnnnnnnnnnnnnnnnnnnnnnnnnnnnnnnnnnnnnnnnnnnnnnnnnnnnnnnnnnnnnnnnnnnnnnnnnnnnnnnnnnnnnnnnnnnnnnnnnnnnnnnnnnnnnnnnnnnnnnnnnnnnnnnnnnnnnnnnnnnnnnnnnnnnnnnnnnnnnnnnnnnnnnnnnnnnnnnnnnnnnnnnnnnnnnnnnnnnnnnnnnnnnnnnnnnnnnnnnnnnnnnnnnnnnnnnnnnnnnnnnnnnnnnnnnnnnnnnnnnnnnnnnnnnnnnnnnnnnnnnnnnnnnnnnnnnnnnnnnnnnnnnnnnnnnnnnnnnnnnnnnnnnnnnnnnnnnnnnnnnnnnnnnnnnnnnnnnnnnnnnnnnnnnnnnnnnnnnnnnnnnnnnnnnnnnnnnnnnnnnnnnnnnnnnnnnnnnnnnnnnnnnnnnnnnnnnnnnnnnnnnnnnnnnnnnnnnnnnnnnnnnnnnnnnnnnnnnnnnnnnnnnnnnnnnnnnnnnnnnnnnnnnnnnnnnnnnnnnnnnnnnnnnnnnnnnnnnnnnnnnnnnnnnnnnnnnnnnnnnnnnnnnnnnnnnnnnnnnnnnnnnnnnnnnnnnnnnnnnnnnnnnnnnnnnnnnnnnnnnnnnnnnnnnnnnnnnnnnnnnnnnnnnnnnnnnnnnnnnnnnnnnnnnnnnnnnnnnnnnnnnnnnnnnnnnnnnnnnnnnnnnnnnnnnnnnnnnnnnnnnnnnnnnnnnnnnnnnnnnnnnnnnnnnnnnnnnnnnnnnnnnnnnnnnnnnnnnnnnnnnnnnnnnnnnnnnnnnnnnnnnnnnnnnnnnnnnnnnnnnnnnnnnnnnnnnnnnnnnnnnnnnnnnnnnnnnnnnnnnnnnnnnnnnnnnnnnnnnnnnnnnnnnnnnnnnnnnnnnnnnnnnnnnnnnnnnnnnnnnnnnnnnnnnnnnnnnnnnnnnnnnnnnnnnnnnnnnnnnnnnnnnnnnnnnnnnnnnnnnnnnnnnnnnnnnnnnnnnnnnnnnnnnnnnnnnnnnnnnnnnnnnnnnnnnnnnnnnnnnnnnnnnnnnnnnnnnnnnnnnnnnnnnnnnnnnnnnnnnnnnnnnnnnnnnnnnnnnnnnnnnnnnnnnnnnnnnnnnnnnnnnnnnnnnnnnnnnnnnnnnnnnnnnnnnnnnnnnnnnnnnnnnnnnnnnnnnnnnnnnnnnnnnnnnnnnnnnnnnnnnnnnnnnnnnnnnnnnnnnnnnnnnnnnnnnnnnnnnnnnnnnnnnnnnnnnnnnnnnnnnnnnnnnnnnnnnnnnnnnnnnnnnnnnnnnnnnnnnnnnnnnnnnnnnnnnnnnnnnnnnnnnnnnnnnnnnnnnnnnnnnnnnnnnnnnnnnnnnnnnnnnnnnnnnnnnnnnnnnnnnnnnnnnnnnnnnnnnnnnnnnnnnnnnnnnnnnnnnnnnnnnnnnnnnnnnnnnnnnnnnnnnnnnnnnnnnnnnnnnnnnnnnnnnnnnnnnnnnnnnnnnnnnnnnnnnnnnnnnnnnnnnnnnnnnnnnnnnnnnnnnnnnnnnnnnnnnnnnnnnnnnnnnnnnnnnnnnnnnnnnnnnnnnnnnnnnnnnnnnnnnnnnnnnnnnnnnnnnnnnnnnnnnnnnnnnnnnnnnnnnnnnnnnnnnnnnnnnnnnnnnnnnnnnnnnnnnnnnnnnnnnnnnnnnnnnnnnnnnnnnnnnnnnnnnnnnnnnnnnnnnnnnnnnnnnnnnnnnnnnnnnnnnnnnnnnnnnnnnnnnnnnnnnnnnnnnnnnnnnnnnnnnnnnnnnnnnnnnnnnnnnnnnnnnnnnnnnnnnnnnnnnnnnnnnnnnnnnnnnnnnnnnnnnnnnnnnnnnnnnnnnnnnnnnnnnnnnnnnnnnnnnnnnnnnnnnnnnnnnnnnnnnnnnnnnnnnnnnnnnnnnnnnnnnnnnnnnnnnnnnnnnnnnnnnnnnnnnnnnnnnnnnnnnnnnnnnnnnnnnnnnnnnnnnnnnnnnnnnnnnnnnnnnnnnnnnnnnnnnnnnnnnnnnnnnnnnnnnnnnnnnnnnnnnnnnnnnnnnnnnnnnnnnnnnnnnnnnnnnnnnnnnnnnnnnnnnnnnnnnnnnnnnnnnnnnnnnnnnnnnnnnnnnnnnnnnnnnnnnnnnnnnnnnnnnnnnnnnnnnnnnnnnnnnnnnnnnnnnnnnnnnnnnnnnnnnnnnnnnnnnnnnnnnnnnnnnnnnnnnnnnnnnnnnnnnnnnnnnnnnnnnnnnnnnnnnnnnnnnnnnnnnnnnnnnnnnnnnnnnnnnnnnnnnnnnnnnnnnnnnnnnnnnnnnnnnnnnnnnnnnnnnnnnnnnnnnnnnnnnnnnnnnnnnnnnnnnnnnnnnnnnnnnnnnnnnnnnnnnnnnnnnnnnnnnnnnnnnnnnnnnnnnnnnnnnnnnnnnnnnnnnnnnnnnnnnnnnnnnnnnnnnnnnnnnnnnnnnnnnnnnnnnnnnnnnnnnnnnnnnnnnnnnnnnnnnnnnnnnnnnnnnnnnnnnnnnnnnnnnnnnnnnnnnnnnnnnnnnnnnnnnnnnnnnnnnnnnnnnnnnnnnnnnnnnnnnnnnnnnnnnnnnnnnnnnnnnnnnnnnnnnnnnnnnnnnnnnnnnnnnnnnnnnnnnnnnnnnnnnnnnnnnnnnnnnnnnnnnnnnnnnnnnnnnnnnnnnnnnnnnnnnnnnnnnnnnnnnnnnnnnnnnnnnnnnnnnnnnnnnnnnnnnnnnnnnnnnnnnnnnnnnnnnnnnnnnnnnnnnnnnnnnnnnnnnnnnnnnnnnnnnnnnnnnnnnnnnnnnnnnnnnnnnnnnnnnnnnnnnnnnnnnnnnnnnnnnnnnnnnnnnnnnnnnnnnnnnnnnnnnnnnnnnnnnnnnnnnnnnnnnnnnnnnnnnnnnnnnnnnnnnnnnnnnnnnnnnnnnnnnnnnnnnnnnnnnnnnnnnnnnnnnnnnnnnnnnnnnnnnnnnnnnnnnnnnnnnnnnnnnnnnnnnnnnnnnnnnnnnnnnnnnnnnnnnnnnnnnnnnnnnnnnnnnnnnnnnnnnnnnnnnnnnnnnnnnnnnnnnnnnnnnnnnnnnnnnnnnnnnnnnnnnnnnnnnnnnnnnnnnnnnnnnnnnnnnnnnnnnnnnnnnnnnnnnnnnnnnnnnnnnnnnnnnnnnnnnnnnnnnnnnnnnnnnnnnnnnnnnnnnnnnnnnnnnnnnnnnnnnnnnnnnnnnnnnnnnnnnnnnnnnnnnnnnnnnnnnnnnnnnnnnnnnnnnnnnnnnnnnnnnnnnnnnnnnnnnnnnnnnnnnnnnnnnnnnnnnnnnnnnnnnnnnnnnnnnnnnnnnnnnnnnnnnnnnnnnnnnnnnnnnnnnnnnnnnnnnnnnnnnnnnnnnnnnnnnnnnnnnnnnnnnnnnnnnnnnnnnnnnnnnnnnnnnnnnnnnnnnnnnnnnnnnnnnnnnnnnnnnnnnnnnnnnnnnnnnnnnnnnnnnnnnnnnnnnnnnnnnnnnnnnnnnnnnnnnnnnnnnnnnnnnnnnnnnnnnnnnnnnnnnnnnnnnnnnnnnnnnnnnnnnnnnnnnnnnnnnnnnnnnnnnnnnnnnnnnnnnnnnnnnnnnnnnnnnnnnnnnnnnnnnnnnnnnnnnnnnnnnnnnnnnnnnnnnnnnnnnnnnnnnnnnnnnnnnnnnnnnnnnnnnnnnnnnnnnnnnnnnnnnnnnnnnnnnnnnnnnnnnnnnnnnnnnnnnnnnnnnnnnnnnnnnnnnnnnnnnnnnnnnnnnnnnnnnnnnnnnnnnnnnnnnnnnnnnnnnnnnnnnnnnnnnnnnnnnnnnnnnnnnnnnnnnnnnnnnnnnnnnnnnnnnnnnnnnnnnnnnnnnnnnnnnnnnnnnnnnnnnnnnnnnnnnnnnnnnnnnnnnnnnnnnnnnnnnnnnnnnnnnnnnnnnnnnnnnnnnnnnnnnnnnnnnnnnnnnnnnnnnnnnnnnnnnnnnnnnnnnnnnnnnnnnnnnnnnnnnnnnnnnnnnnnnnnnnnnnnnnnnnnnnnnnnnnnnnnnnnnnnnnnnnnnnnnnnnnnnnnnnnnnnnnnnnnnnnnnnnnnnnnnnnnnnnnnnnnnnnnnnnnnnnnnnnnnnnnnnnnnnnnnnnnnnnnnnnnnnnnnnnnnnnnnnnnnnnnnnnnnnnnnnnnnnnnnnnnnnnnnnnnnnnnnnnnnnnnnnnnnnnnnnnnnnnnnnnnnnnnnnnnnnnnnnnnnnnnnnnnnnnnnnnnnnnnnnnnnnnnnnnnnnnnnnnnnnnnnnnnnnnnnnnnnnnnnnnnnnnnnnnnnnnnnnnnnnnnnnnnnnnnnnnnnnnnnnnnnnnnnnnnnnnnnnnnnnnnnnnnnnnnnnnnnnnnnnnnnnnnnnnnnnnnnnnnnnnnnnnnnnnnnnnnnnnnnnnnnnnnnnnnnnnnnnnnnnnnnnnnnnnnnnnnnnnnnnnnnnnnnnnnnnnnnnnnnnnnnnnnnnnnnnnnnnnnnnnnnnnnnnnnnnnnnnnnnnnnnnnnnnnnnnnnnnnnnnnnnnnnnnnnnnnnnnnnnnnnnnnnnnnnnnnnnnnnnnnnnnnnnnnnnnnnnnnnnnnnnnnnnnnnnnnnnnnnnnnnnnnnnnnnnnnnnnnnnnnnnnnnnnnnnnnnnnnnnnnnnnnnnnnnnnnnnnnnnnnnnnnnnnnnnnnnnnnnnnnnnnnnnnnnnnnnnnnnnnnnnnnnnnnnnnnnnnnnnnnnnnnnnnnnnnnnnnnnnnnnnnnnnnnnnnnnnnnnnnnnnnnnnnnnnnnnnnnnnnnnnnnnnnnnnnnnnnnnnnnnnnnnnnnnnnnnnnnnnnnnnnnnnnnnnnnnnnnnnnnnnnnnnnnnnnnnnnnnnnnnnnnnnnnnnnnnnnnnnnnnnnnnnnnnnnnnnnnnnnnnnnnnnnnnnnnnnnnnnnnnnnnnnnnnnnnnnnnnnnnnnnnnnnnnnnnnnnnnnnnnnnnnnnnnnnnnnnnnnnnnnnnnnnnnnnnnnnnnnnnnnnnnnnnnnnnnnnnnnnnnnnnnnnnnnnnnnnnnnnnnnnnnnnnnnnnnnnnnnnnnnnnnnnnnnnnnnnnnnnnnnnnnnnnnnnnnnnnnnnnnnnnnnnnnnnnnnnnnnnnnnnnnnnnnnnnnnnnnnnnnnnnnnnnnnnnnnnnnnnnnnnnnnnnnnnnnnnnnnnnnnnnnnnnnnnnnnnnnnnnnnnnnnnnnnnnnnnnnnnnnnnnnnnnnnnnnnnnnnnnnnnnnnnnnnnnnnnnnnnnnnnnnnnnnnnnnnnnnnnnnnnnnnnnnnnnnnnnnnnnnnnnnnnnnnnnnnnnnnnnnnnnnnnnnnnnnnnnnnnnnnnnnnnnnnnnnnnnnnnnnnnnnnnnnnnnnnnnnnnnnnnnnnnnnnnnnnnnnnnnnnnnnnnnnnnnnnnnnnnnnnnnnnnnnnnnnnnnnnnnnnnnnnnnnnnnnnnnnnnnnnnnnnnnnnnnnnnnnnnnnnnnnnnnnnnnnnnnnnnnnnnnnnnnnnnnnnnnnnnnnnnnnnnnnnnnnnnnnnnnnnnnnnnnnnnnnnnnnnnnnnnnnnnnnnnnnnnnnnnnnnnnnnnnnnnnnnnnnnnnnnnnnnnnnnnnnnnnnnnnnnnnnnnnnnnnnnnnnnnnnnnnnnnnnnnnnnnnnnnnnnnnnnnnnnnnnnnnnnnnnnnnnnnnnnnnnnnnnnnnnnnnnnnnnnnnnnnnnnnnnnnnnnnnnnnnnnnnnnnnnnnnnnnnnnnnnnnnnnnnnnnnnnnnnnnnnnnnnnnnnnnnnnnnnnnnnnnnnnnnnnnnnnnnnnnnnnnnnnnnnnnnnnnnnnnnnnnnnnnnnnnnnnnnnnnnnnnnnnnnnnnnnnnnnnnnnnnnnnnnnnnnnnnnnnnnnnnnnnnnnnnnnnnnnnnnnnnnnnnnnnnnnnnnnnnnnnnnnnnnnnnnnnnnnnnnnnnnnnnnnnnnnnnnnnnnnnnnnnnnnnnnnnnnnnnnnnnnnnnnnnnnnnnnnnnnnnnnnnnnnnnnnnnnnnnnnnnnnnnnnnnnnnnnnnnnnnnnnnnnnnnnnnnnnnnnnnnnnnnnnnnnnnnnnnnnnnnnnnnnnnnnnnnnnnnnnnnnnnnnnnnnnnnnnnnnnnnnnnnnnnnnnnnnnnnnnnnnnnnnnnnnnnnnnnnnnnnnnnnnnnnnnnnnnnnnnnnnnnnnnnnnnnnnnnnnnnnnnnnnnnnnnnnnnnnnnnnnnnnnnnnnnnnnnnnnnnnnnnnnnnnnnnnnnnnnnnnnnnnnnnnnnnnnnnnnnnnnnnnnnnnnnnnnnnnnnnnnnnnnnnnnnnnnnnnnnnnnnnnnnnnnnnnnnnnnnnnnnnnnnnnnnnnnnnnnnnnnnnnnnnnnnnnnnnnnnnnnnnnnnnnnnnnnnnnnnnnnnnnnnnnnnnnnnnnnnnnnnnnnnnnnnnnnnnnnnnnnnnnnnnnnnnnnnnnnnnnnnnnnnnnnnnnnnnnnnnnnnnnnnnnnnnnnnnnnnnnnnnnnnnnnnnnnnnnnnnnnnnnnnnnnnnnnnnnnnnnnnnnnnnnnnnnnnnnnnnnnnnnnnnnnnnnnnnnnnnnnnnnnnnnnnnnnnnnnnnnnnnnnnnnnnnnnnnnnnnnnnnnnnnnnnnnnnnnnnnnnnnnnnnnnnnnnnnnnnnnnnnnnnnnnnnnnnnnnnnnnnnnnnnnnnnnnnnnnnnnnnnnnnnnnnnnnnnnnnnnnnnnnnnnnnnnnnnnnnnnnnnnnnnnnnnnnnnnnnnnnnnnnnnnnnnnnnnnnnnnnnnnnnnnnnnnnnnnnnnnnnnnnnnnnnnnnnnnnnnnnnnnnnnnnnnnnnnnnnnnnnnnnnnnnnnnnnnnnnnnnnnnnnnnnnnnnnnnnnnnnnnnnnnnnnnnnnnnnnnnnnnnnnnnnnnnnnnnnnnnnnnnnnnnnnnnnnnnnnnnnnnnnnnnnnnnnnnnnnnnnnnnnnnnnnnnnnnnnnnnnnnnnnnnnnnnnnnnnnnnnnnnnnnnnnnnnnnnnnnnnnnnnnnnnnnnnnnnnnnnnnnnnnnnnnnnnnnnnnnnnnnnnnnnnnnnnnnnnnnnnnnnnnnnnnnnnnnnnnnnnnnnnnnnnnnnnnnnnnnnnnnnnnnnnnnnnnnnnnnnnnnnnnnnnnnnnnnnnnnnnnnnnnnnnnnnnnnnnnnnnnnnnnnnnnnnnnnnnnnnnnnnnnnnnnnnnnnnnnnnnnnnnnnnnnnnnnnnnnnnnnnnnnnnnnnnnnnnnnnnnnnnnnnnnnnnnnnnnnnnnnnnnnnnnnnnnnnnnnnnnnnnnnnnnnnnnnnnnnnnnnnnnnnnnnnnnnnnnnnnnnnnnnnnnnnnnnnnnnnnnnnnnnnnnnnnnnnnnnnnnnnnnnnnnnnnnnnnnnnnnnnnnnnnnnnnnnnnnnnnnnnnnnnnnnnnnnnnnnnnnnnnnnnnnnnnnnnnnnnnnnnnnnnnnnnnnnnnnnnnnnnnnnnnnnnnnnnnnnnnnnnnnnnnnnnnnnnnnnnnnnnnnnnnnnnnnnnnnnnnnnnnnnnnnnnnnnnnnnnnnnnnnnnnnnnnnnnnnnnnnnnnnnnnnnnnnnnnnnnnnnnnnnnnnnnnnnnnnnnnnnnnnnnnnnnnnnnnnnnnnnnnnnnnnnnnnnnnnnnnnnnnnnnnnnnnnnnnnnnnnnnnnnnnnnnnnnnnnnnnnnnnnnnnnnnnnnnnnnnnnnnnnnnnnnnnnnnnnnnnnnnnnnnnnnnnnnnnnnnnnnnnnnnnnnnnnnnnnnnnnnnnnnnnnnnnnnnnnnnnnnnnnnnnnnnnnnnnnnnnnnnnnnnnnnnnnnnnnnnnnnnnnnnnnnnnnnnnnnnnnnnnnnnnnnnnnnnnnnnnnnnnnnnnnnnnnnnnnnnnnnnnnnnnnnnnnnnnnnnnnnnnnnnnnnnnnnnnnnnnnnnnnnnnnnnnnnnnnnnnnnnnnnnnnnnnnnnnnnnnnnnnnnnnnnnnnnnnnnnnnnnnnnnnnnnnnnnnnnnnnnnnnnnnnnnnnnnnnnnnnnnnnnnnnnnnnnnnnnnnnnnnnnnnnnnnnnnnnnnnnnnnnnnnnnnnnnnnnnnnnnnnnnnnnnnnnnnnnnnnnnnnnnnnnnnnnnnnnnnnnnnnnnnnnnnnnnnnnnnnnnnnnnnnnnnnnnnnnnnnnnnnnnnnnnnnnnnnnnnnnnnnnnnnnnnnnnnnnnnnnnnnnnnnnnnnnnnnnnnnnnnnnnnnnnnnnnnnnnnnnnnnnnnnnnnnnnnnnnnnnnnnnnnnnnnnnnnnnnnnnnnnnnnnnnnnnnnnnnnnnnnnnnnnnnnnnnnnnnnnnnnnnnnnnnnnnnnnnnnnnnnnnnnnnnnnnnnnnnnnnnnnnnnnnnnnnnnnnnnnnnnnnnnnnnnnnnnnnnnnnnnnnnnnnnnnnnnnnnnnnnnnnnnnnnnnnnnnnnnnnnnnnnnnnnnnnnnnnnnnnnnnnnnnnnnnnnnnnnnnnnnnnnnnnnnnnnnnnnnnnnnnnnnnnnnnnnnnnnnnnnnnnnnnnnnnnnnnnnnnnnnnnnnnnnnnnnnnnnnnnnnnnnnnnnnnnnnnnnnnnnnnnnnnnnnnnnnnnnnnnnnnnnnnnnnnnnnnnnnnnnnnnnnnnnnnnnnnnnnnnnnnnnnnnnnnnnnnnnnnnnnnnnnnnnnnnnnnnnnnnnnnnnnnnnnnnnnnnnnnnnnnnnnnnnnnnnnnnnnnnnnnnnnnnnnnnnnnnnnnnnnnnnnnnnnnnnnnnnnnnnnnnnnnnnnnnnnnnnnnnnnnnnnnnnnnnnnnnnnnnnnnnnnnnnnnnnnnnnnnnnnnnnnnnnnnnnnnnnnnnnnnnnnnnnnnnnnnnnnnnnnnnnnnnnnnnnnnnnnnnnnnnnnnnnnnnnnnnnnnnnnnnnnnnnnnnnnnnnnnnnnnnnnnnnnnnnnnnnnnnnnnnnnnnnnnnnnnnnnnnnnnnnnnnnnnnnnnnnnnnnnnnnnnnnnnnnnnnnnnnnnnnnnnnnnnnnnnnnnnnnnnnnnnnnnnnnnnnnnnnnnnnnnnnnnnnnnnnnnnnnnnnnnnnnnnnnnnnnnnnnnnnnnnnnnnnnnnnnnnnnnnnnnnnnnnnnnnnnnnnnnnnnnnnnnnnnnnnnnnnnnnnnnnnnnnnnnnnnnnnnnnnnnnnnnnnnnnnnnnnnnnnnnnnnnnnnnnnnnnnnnnnnnnnnnnnnnnnnnnnnnnnnnnnnnnnnnnnnnnnnnnnnnnnnnnnnnnnnnnnnnnnnnnnnnnnnnnnnnnnnnnnnnnnnnnnnnnnnnnnnnnnnnnnnnnnnnnnnnnnnnnnnnnnnnnnnnnnnnnnnnnnnnnnnnnnnnnnnnnnnnnnnnnnnnnnnnnnnnnnnnnnnnnnnnnnnnnnnnnnnnnnnnnnnnnnnnnnnnnnnnnnnnnnnnnnnnnnnnnnnnnnnnnnnnnnnnnnnnnnnnnnnnnnnnnnnnnnnnnnnnnnnnnnnnnnnnnnnnnnnnnnnnnnnnnnnnnnnnnnnnnnnnnnnnnnnnnnnnnnnnnnnnnnnnnnnnnnnnnnnnnnnnnnnnnnnnnnnnnnnnnnnnnnnnnnnnnnnnnnnnnnnnnnnnnnnnnnnnnnnnnnnnnnnnnnnnnnnnnnnnnnnnnnnnnnnnnnnnnnnnnnnnnnnnnnnnnnnnnnnnnnnnnnnnnnnnnnnnnnnnnnnnnnnnnnnnnnnnnnnnnnnnnnnnnnnnnnnnnnnnnnnnnnnnnnnnnnnnnnnnnnnnnnnnnnnnnnnnnnnnnnnnnnnnnnnnnnnnnnnnnnnnnnnnnnnnnnnnnnnnnnnnnnnnnnnnnnnnnnnnnnnnnnnnnnnnnnnnnnnnnnnnnnnnnnnnnnnnnnnnnnnnnnnnnnnnnnnnnnnnnnnnnnnnnnnnnnnnnnnnnnnnnnnnnnnnnnnnnnnnnnnnnnnnnnnnnnnnnnnnnnnnnnnnnnnnnnnnnnnnnnnnnnnnnnnnnnnnnnnnnnnnnnnnnnnnnnnnnnnnnnnnnnnnnnnnnnnnnnnnnnnnnnnnnnnnnnnnnnnnnnnnnnnnnnnnnnnnnnnnnnnnnnnnnnnnnnnnnnnnnnnnnnnnnnnnnnnnnnnnnnnnnnnnnnnnnnnnnnnnnnnnnnnnnnnnnnnnnnnnnnnnnnnnnnnnnnnnnnnnnnnnnnnnnnnnnnnnnnnnnnnnnnnnnnnnnnnnnnnnnnnnnnnnnnnnnnnnnnnnnnnnnnnnnnnnnnnnnnnnnnnnnnnnnnnnnnnnnnnnnnnnnnnnnnnnnnnnnnnnnnnnnnnnnnnnnnnnnnnnnnnnnnnnnnnnnnnnnnnnnnnnnnnnnnnnnnnnnnnnnnnnnnnnnnnnnnnnnnnnnnnnnnnnnnnnnnnnnnnnnnnnnnnnnnnnnnnnnnnnnnnnnnnnnnnnnnnnnnnnnnnnnnnnnnnnnnnnnnnnnnnnnnnnnnnnnnnnnnnnnnnnnnnnnnnnnnnnnnnnnnnnnnnnnnnnnnnnnnnnnnnnnnnnnnnnnnnnnnnnnnnnnnnnnnnnnnnnnnnnnnnnnnnnnnnnnnnnnnnnnnnnnnnnnnnnnnnnnnnnnnnnnnnnnnnnnnnnnnnnnnnnnnnnnnnnnnnnnnnnnnnnnnnnnnnnnnnnnnnnnnnnnnnnnnnnnnnnnnnnnnnnnnnnnnnnnnnnnnnnnnnnnnnnnnnnnnnnnnnnnnnnnnnnnnnnnnnnnnnnnnnnnnnnnnnnnnnnnnnnnnnnnnnnnnnnnnnnnnnnnnnnnnnnnnnnnnnnnnnnnnnnnnnnnnnnnnnnnnnnnnnnnnnnnnnnnnnnnnnnnnnnnnnnnnnnnnnnnnnnnnnnnnnnnnnnnnnnnnnnnnnnnnnnnnnnnnnnnnnnnnnnnnnnnnnnnnnnnnnnnnnnnnnnnnnnnnnnnnnnnnnnnnnnnnnnnnnnnnnnnnnnnnnnnnnnnnnnnnnnnnnnnnnnnnnnnnnnnnnnnnnnnnnnnnnnnnnnnnnnnnnnnnnnnnnnnnnnnnnnnnnnnnnnnnnnnnnnnnnnnnnnnnnnnnnnnnnnnnnnnnnnnnnnnnnnnnnnnnnnnnnnnnnnnnnnnnnnnnnnnnnnnnnnnnnnnnnnnnnnnnnnnnnnnnnnnnnnnnnnnnnnnnnnnnnnnnnnnnnnnnnnnnnnnnnnnnnnnnnnnnnnnnnnnnnnnnnnnnnnnnnnnnnnnnnnnnnnnnnnnnnnnnnnnnnnnnnnnnnnnnnnnnnnnnnnnnnnnnnnnnnnnnnnnnnnnnnnnnnnnnnnnnnnnnnnnnnnnnnnnnnnnnnnnnnnnnnnnnnnnnnnnnnnnnnnnnnnnnnnnnnnnnnnnnnnnnnnnnnnnnnnnnnnnnnnnnnnnnnnnnnnnnnnnnnnnnnnnnnnnnnnnnnnnnnnnnnnnnnnnnnnnnnnnnnnnnnnnnnnnnnnnnnnnnnnnnnnnnnnnnnnnnnnnnnnnnnnnnnnnnnnnnnnnnnnnnnnnnnnnnnnnnnnnnnnnnnnnnnnnnnnnnnnnnnnnnnnnnnnnnnnnnnnnnnnnnnnnnnnnnnnnnnnnnnnnnnnnnnnnnnnnnnnnnnnnnnnnnnnnnnnnnnnnnnnnnnnnnnnnnnnnnnnnnnnnnnnnnnnnnnnnnnnnnnnnnnnnnnnnnnnnnnnnnnnnnnnnnnnnnnnnnnnnnnnnnnnnnnnnnnnnnnnnnnnnnnnnnnnnnnnnnnnnnnnnnnnnnnnnnnnnnnnnnnnnnnnnnnnnnnnnnnnnnnnnnnnnnnnnnnnnnnnnnnnnnnnnnnnnnnnnnnnnnnnnnnnnnnnnnnnnnnnnnnnnnnnnnnnnnnnnnnnnnnnnnnnnnnnnnnnnnnnnnnnnnnnnnnnnnnnnnnnnnnnnnnnnnnnnnnnnnnnnnnnnnnnnnnnnnnnnnnnnnnnnnnnnnnnnnnnnnnnnnnnnnnnnnnnnnnnnnnnnnnnnnnnnnnnnnnnnnnnnnnnnnnnnnnnnnnnnnnnnnnnnnnnnnnnnnnnnnnnnnnnnnnnnnnnnnnnnnnnnnnnnnnnnnnnnnnnnnnnnnnnnnnnnnnnnnnnnnnnnnnnnnnnnnnnnnnnnnnnnnnnnnnnnnnnnnnnnnnnnnnnnnnnnnnnnnnnnnnnnnnnnnnnnnnnnnnnnnnnnnnnnnnnnnnnnnnnnnnnnnnnnnnnnnnnnnnnnnnnnnnnnnnnnnnnnnnnnnnnnnnnnnnnnnnnnnnnnnnnnnnnnnnnnnnnnnnnnnnnnnnnnnnnnnnnnnnnnnnnnnnnnnnnnnnnnnnnnnnnnnnnnnnnnnnnnnnnnnnnnnnnnnnnnnnnnnnnnnnnnnnnnnnnnnnnnnnnnnnnnnnnnnnnnnnnnnnnnnnnnnnnnnnnnnnnnnnnnnnnnnnnnnnnnnnnnnnnnnnnnnnnnnnnnnnnnnnnnnnnnnnnnnnnnnnnnnnnnnnnnnnnnnnnnnnnnnnnnnnnnnnnnnnnnnnnnnnnnnnnnnnnnnnnnnnnnnnnnnnnnnnnnnnnnnnnnnnnnnnnnnnnnnnnnnnnnnnnnnnnnnnnnnnnnnnnnnnnnnnnnnnnnnnnnnnnnnnnnnnnnnnnnnnnnnnnnnnnnnnnnnnnnnnnnnnnnnnnnnnnnnnnnnnnnnnnnnnnnnnnnnnnnnnnnnnnnnnnnnnnnnnnnnnnnnnnnnnnnnnnnnnnnnnnnnnnnnnnnnnnnnnnnnnnnnnnnnnnnnnnnnnnnnnnnnnnnnnnnnnnnnnnnnnnnnnnnnnnnnnnnnnnnnnnnnnnnnnnnnnnnnnnnnnnnnnnnnnnnnnnnnnnnnnnnnnnnnnnnnnnnnnnnnnnnnnnnnnnnnnnnnnnnnnnnnnnnnnnnnnnnnnnnnnnnnnnnnnnnnnnnnnnnnnnnnnnnnnnnnnnnnnnnnnnnnnnnnnnnnnnnnnnnnnnnnnnnnnnnnnnnnnnnnnnnnnnnnnnnnnnnnnnnnnnnnnnnnnnnnnnnnnnnnnnnnnnnnnnnnnnnnnnnnnnnnnnnnnnnnnnnnnnnnnnnnnnnnnnnnnnnnnnnnnnnnnnnnnnnnnnnnnnnnnnnnnnnnnnnnnnnnnnnnnnnnnnnnnnnnnnnnnnnnnnnnnnnnnnnnnnnnnnnnnnnnnnnnnnnnnnnnnnnnnnnnnnnnnnnnnnnnnnnnnnnnnnnnnnnnnnnnnnnnnnnnnnnnnnnnnnnnnnnnnnnnnnnnnnnnnnnnnnnnnnnnnnnnnnnnnnnnnnnnnnnnnnnnnnnnnnnnnnnnnnnnnnnnnnnnnnnnnnnnnnnnnnnnnnnnnnnnnnnnnnnnnnnnnnnnnnnnnnnnnnnnnnnnnnnnnnnnnnnnnnnnnnnnnnnnnnnnnnnnnnnnnnnnnnnnnnnnnnnnnnnnnnnnnnnnnnnnnnnnnnnnnnnnnnnnnnnnnnnnnnnnnnnnnnnnnnnnnnnnnnnnnnnnnnnnnnnnnnnnnnnnnnnnnnnnnnnnnnnnnnnnnnnnnnnnnnnnnnnnnnnnnnnnnnnnnnnnnnnnnnnnnnnnnnnnnnnnnnnnnnnnnnnnnnnnnnnnnnnnnnnnnnnnnnnnnnnnnnnnnnnnnnnnnnnnnnnnnnnnnnnnnnnnnnnnnnnnnnnnnnnnnnnnnnnnnnnnnnnnnnnnnnnnnnnnnnnnnnnnnnnnnnnnnnnnnnnnnnnnnnnnnnnnnnnnnnnnnnnnnnnnnnnnnnnnnnnnnnnnnnnnnnnnnnnnnnnnnnnnnnnnnnnnnnnnnnnnnnnnnnnnnnnnnnnnnnnnnnnnnnnnnnnnnnnnnnnnnnnnnnnnnnnnnnnnnnnnnnnnnnnnnnnnnnnnnnnnnnnnnnnnnnnnnnnnnnnnnnnnnnnnnnnnnnnnnnnnnnnnnnnnnnnnnnnnnnnnnnnnnnnnnnnnnnnnnnnnnnnnnnnnnnnnnnnnnnnnnnnnnnnnnnnnnnnnnnnnnnnnnnnnnnnnnnnnnnnnnnnnnnnnnnnnnnnnnnnnnnnnnnnnnnnnnnnnnnnnnnnnnnnnnnnnnnnnnnnnnnnnnnnnnnnnnnnnnnnnnnnnnnnnnnnnnnnnnnnnnnnnnnnnnnnnnnnnnnnnnnnnnnnnnnnnnnnnnnnnnnnnnnnnnnnnnnnnnnnnnnnnnnnnnnnnnnnnnnnnnnnnnnnnnnnnnnnnnnnnnnnnnnnnnnnnnnnnnnnnnnnnnnnnnnnnnnnnnnnnnnnnnnnnnnnnnnnnnnnnnnnnnnnnnnnnnnnnnnnnnnnnnnnnnnnnnnnnnnnnnnnnnnnnnnnnnnnnnnnnnnnnnnnnnnnnnnnnnnnnnnnnnnnnnnnnnnnnnnnnnnnnnnnnnnnnnnnnnnnnnnnnnnnnnnnnnnnnnnnnnnnnnnnnnnnnnnnnnnnnnnnnnnnnnnnnnnnnnnnnnnnnnnnnnnnnnnnnnnnnnnnnnnnnnnnnnnnnnnnnnnnnnnnnnnnnnnnnnnnnnnnnnnnnnnnnnnnnnnnnnnnnnnnnnnnnnnnnnnnnnnnnnnnnnnnnnnnnnnnnnnnnnnnnnnnnnnnnnnnnnnnnnnnnnnnnnnnnnnnnnnnnnnnnnnnnnnnnnnnnnnnnnnnnnnnnnnnnnnnnnnnnnnnnnnnnnnnnnnnnnnnnnnnnnnnnnnnnnnnnnnnnnnnnnnnnnnnnnnnnnnnnnnnnnnnnnnnnnnnnnnnnnnnnnnnnnnnnnnnnnnnnnnnnnnnnnnnnnnnnnnnnnnnnnnnnnnnnnnnnnnnnnnnnnnnnnnnnnnnnnnnnnnnnnnnnnnnnnnnnnnnnnnnnnnnnnnnnnnnnnnnnnnnnnnnnnnnnnnnnnnnnnnnnnnnnnnnnnnnnnnnnnnnnnnnnnnnnnnnnnnnnnnnnnnnnnnnnnnnnnnnnnnnnnnnnnnnnnnnnnnnnnnnnnnnnnnnnnnnnnnnnnnnnnnnnnnnnnnnnnnnnnnnnnnnnnnnnnnnnnnnnnnnnnnnnnnnnnnnnnnnnnnnnnnnnnnnnnnnnnnnnnnnnnnnnnnnnnnnnnnnnnnnnnnnnnnnnnnnnnnnnnnnnnnnnnnnnnnnnnnnnnnnnnnnnnnnnnnnnnnnnnnnnnnnnnnnnnnnnnnnnnnnnnnnnnnnnnnnnnnnnnnnnnnnnnnnnnnnnnnnnnnnnnnnnnnnnnnnnnnnnnnnnnnnnnnnnnnnnnnnnnnnnnnnnnnnnnnnnnnnnnnnnnnnnnnnnnnnnnnnnnnnnnnnnnnnnnnnnnnnnnnnnnnnnnnnnnnnnnnnnnnnnnnnnnnnnnnnnnnnnnnnnnnnnnnnnnnnnnnnnnnnnnnnnnnnnnnnnnnnnnnnnnnnnnnnnnnnnnnnnnnnnnnnnnnnnnnnnnnnnnnnnnnnnnnnnnnnnnnnnnnnnnnnnnnnnnnnnnnnnnnnnnnnnnnnnnnnnnnnnnnnnnnnnnnnnnnnnnnnnnnnnnnnnnnnnnnnnnnnnnnnnnnnnnnnnnnnnnnnnnnnnnnnnnnnnnnnnnnnnnnnnnnnnnnnnnnnnnnnnnnnnnnnnnnnnnnnnnnnnnnnnnnnnnnnnnnnnnnnnnnnnnnnnnnnnnnnnnnnnnnnnnnnnnnnnnnnnnnnnnnnnnnnnnnnnnnnnnnnnnnnnnnnnnnnnnnnnnnnnnnnnnnnnnnnnnnnnnnnnnnnnnnnnnnnnnnnnnnnnnnnnnnnnnnnnnnnnnnnnnnnnnnnnnnnnnnnnnnnnnnnnnnnnnnnnnnnnnnnnnnnnnnnnnnnnnnnnnnnnnnnnnnnnnnnnnnnnnnnnnnnnnnnnnnnnnnnnnnnnnnnnnnnnnnnnnnnnnnnnnnnnnnnnnnnnnnnnnnnnnnnnnnnnnnnnnnnnnnnnnnnnnnnnnnnnnnnnnnnnnnnnnnnnnnnnnnnnnnnnnnnnnnnnnnnnnnnnnnnnnnnnnnnnnnnnnnnnnnnnnnnnnnnnnnnnnnnnnnnnnnnnnnnnnnnnnnnnnnnnnnnnnnnnnnnnnnnnnnnnnnnnnnnnnnnnnnnnnnnnnnnnnnnnnnnnnnnnnnnnnnnnnnnnnnnnnnnnnnnnnnnnnnnnnnnnnnnnnnnnnnnnnnnnnnnnnnnnnnnnnnnnnnnnnnnnnnnnnnnnnnnnnnnnnnnnnnnnnnnnnnnnnnnnnnnnnnnnnnnnnnnnnnnnnnnnnnnnnnnnnnnnnnnnnnnnnnnnnnnnnnnnnnnnnnnnnnnnnnnnnnnnnnnnnnnnnnnnnnnnnnnnnnnnnnnnnnnnnnnnnnnnnnnnnnnnnnnnnnnnnnnnnnnnnnnnnnnnnnnnnnnnnnnnnnnnnnnnnnnnnnnnnnnnnnnnnnnnnnnnnnnnnnnnnnnnnnnnnnnnnnnnnnnnnnnnnnnnnnnnnnnnnnnnnnnnnnnnnnnnnnnnnnnnnnnnnnnnnnnnnnnnnnnnnnnnnnnnnnnnnnnnnnnnnnnnnnnnnnnnnnnnnnnnnnnnnnnnnnnnnnnnnnnnnnnnnnnnnnnnnnnnnnnnnnnnnnnnnnnnnnnnnnnnnnnnnnnnnnnnnnnnnnnnnnnnnnnnnnnnnnnnnnnnnnnnnnnnnnnnnnnnnnnnnnnnnnnnnnnnnnnnnnnnnnnnnnnnnnnnnnnnnnnnnnnnnnnnnnnnnnnnnnnnnnnnnnnnnnnnnnnnnnnnnnnnnnnnnnnnnnnnnnnnnnnnnnnnnnnnnnnnnnnnnnnnnnnnnnnnnnnnnnnnnnnnnnnnnnnnnnnnnnnnnnnnnnnnnnnnnnnnnnnnnnnnnnnnnnnnnnnnnnnnnnnnnnnnnnnnnnnnnnnnnnnnnnnnnnnnnnnnnnnnnnnnnnnnnnnnnnnnnnnnnnnnnnnnnnnnnnnnnnnnnnnnnnnnnnnnnnnnnnnnnnnnnnnnnnnnnnnnnnnnnnnnnnnnnnnnnnnnnnnnnnnnnnnnnnnnnnnnnnnnnnnnnnnnnnnnnnnnnnnnnnnnnnnnnnnnnnnnnnnnnnnnnnnnnnnnnnnnnnnnnnnnnnnnnnnnnnnnnnnnnnnnnnnnnnnnnnnnnnnnnnnnnnnnnnnnnnnnnnnnnnnnnnnnnnnnnnnnnnnnnnnnnnnnnnnnnnnnnnnnnnnnnnnnnnnnnnnnnnnnnnnnnnnnnnnnnnnnnnnnnnnnnnnnnnnnnnnnnnnnnnnnnnnnnnnnnnnnnnnnnnnnnnnnnnnnnnnnnnnnnnnnnnnnnnnnnnnnnnnnnnnnnnnnnnnnnnnnnnnnnnnnnnnnnnnnnnnnnnnnnnnnnnnnnnnnnnnnnnnnnnnnnnnnnnnnnnnnnnnnnnnnnnnnnnnnnnnnnnnnnnnnnnnnnnnnnnnnnnnnnnnnnnnnnnnnnnnnnnnnnnnnnnnnnnnnnnnnnnnnnnnnnnnnnnnnnnnnnnnnnnnnnnnnnnnnnnnnnnnnnnnnnnnnnnnnnnnnnnnnnnnnnnnnnnnnnnnnnnnnnnnnnnnnnnnnnnnnnnnnnnnnnnnnnnnnnnnnnnnnnnnnnnnnnnnnnnnnnnnnnnnnnnnnnnnnnnnnnnnnnnnnnnnnnnnnnnnnnnnnnnnnnnnnnnnnnnnnnnnnnnnnnnnnnnnnnnnnnnnnnnnnnnnnnnnnnnnnnnnnnnnnnnnnnnnnnnnnnnnnnnnnnnnnnnnnnnnnnnnnnnnnnnnnnnnnnnnnnnnnnnnnnnnnnnnnnnnnnnnnnnnnnnnnnnnnnnnnnnnnnnnnnnnnnnnnnnnnnnnnnnnnnnnnnnnnnnnnnnnnnnnnnnnnnnnnnnnnnnnnnnnnnnnnnnnnnnnnnnnnnnnnnnnnnnnnnnnnnnnnnnnnnnnnnnnnnnnnnnnnnnnnnnnnnnnnnnnnnnnnnnnnnnnnnnnnnnnnnnnnnnnnnnnnnnnnnnnnnnnnnnnnnnnnnnnnnnnnnnnnnnnnnnnnnnnnnnnnnnnnnnnnnnnnnnnnnnnnnnnnnnnnnnnnnnnnnnnnnnnnnnnnnnnnnnnnnnnnnnnnnnnnnnnnnnnnnnnnnnnnnnnnnnnnnnnnnnnnnnnnnnnnnnnnnnnnnnnnnnnnnnnnnnnnnnnnnnnnnnnnnnnnnnnnnnnnnnnnnnnnnnnnnnnnnnnnnnnnnnnnnnnnnnnnnnnnnnnnnnnnnnnnnnnnnnnnnnnnnnnnnnnnnnnnnnnnnnnnnnnnnnnnnnnnnnnnnnnnnnnnnnnnnnnnnnnnnnnnnnnnnnnnnnnnnnnnnnnnnnnnnnnnnnnnnnnnnnnnnnnnnnnnnnnnnnnnnnnnnnnnnnnnnnnnnnnnnnnnnnnnnnnnnnnnnnnnnnnnnnnnnnnnnnnnnnnnnnnnnnnnnnnnnnnnnnnnnnnnnnnnnnnnnnnnnnnnnnnnnnnnnnnnnnnnnnnnnnnnnnnnnnnnnnnnnnnnnnnnnnnnnnnnnnnnnnnnnnnnnnnnnnnnnnnnnnnnnnnnnnnnnnnnnnnnnnnnnnnnnnnnnnnnnnnnnnnnnnnnnnnnnnnnnnnnnnnnnnnnnnnnnnnnnnnnnnnnnnnnnnnnnnnnnnnnnnnnnnnnnnnnnnnnnnnnnnnnnnnnnnnnnnnnnnnnnnnnnnnnnnnnnnnnnnnnnnnnnnnnnnnnnnnnnnnnnnnnnnnnnnnnnnnnnnnnnnnnnnnnnnnnnnnnnnnnnnnnnnnnnnnnnnnnnnnnnnnnnnnnnnnnnnnnnnnnnnnnnnnnnnnnnnnnnnnnnnnnnnnnnnnnnnnnnnnnnnnnnnnnnnnnnnnnnnnnnnnnnnnnnnnnnnnnnnnnnnnnnnnnnnnnnnnnnnnnnnnnnnnnnnnnnnnnnnnnnnnnnnnnnnnnnnnnnnnnnnnnnnnnnnnnnnnnnnnnnnnnnnnnnnnnnnnnnnnnnnnnnnnnnnnnnnnnnnnnnnnnnnnnnnnnnnnnnnnnnnnnnnnnnnnnnnnnnnnnnnnnnnnnnnnnnnnnnnnnnnnnnnnnnnnnnnnnnnnnnnnnnnnnnnnnnnnnnnnnnnnnnnnnnnnnnnnnnnnnnnnnnnnnnnnnnnnnnnnnnnnnnnnnnnnnnnnnnnnnnnnnnnnnnnnnnnnnnnnnnnnnnnnnnnnnnnnnnnnnnnnnnnnnnnnnnnnnnnnnnnnnnnnnnnnnnnnnnnnnnnnnnnnnnnnnnnnnnnnnnnnnnnnnnnnnnnnnnnnnnnnnnnnnnnnnnnnnnnnnnnnnnnnnnnnnnnnnnnnnnnnnnnnnnnnnnnnnnnnnnnnnnnnnnnnnnnnnnnnnnnnnnnnnnnnnnnnnnnnnnnnnnnnnnnnnnnnnnnnnnnnnnnnnnnnnnnnnnnnnnnnnnnnnnnnnnnnnnnnnnnnnnnnnnnnnnnnnnnnnnnnnnnnnnnnnnnnnnnnnnnnnnnnnnnnnnnnnnnnnnnnnnnnnnnnnnnnnnnnnnnnnnnnnnnnnnnnnnnnnnnnnnnnnnnnnnnnnnnnnnnnnnnnnnnnnnnnnnnnnnnnnnnnnnnnnnnnnnnnnnnnnnnnnnnnnnnnnnnnnnnnnnnnnnnnnnnnnnnnnnnnnnnnnnnnnnnnnnnnnnnnnnnnnnnnnnnnnnnnnnnnnnnnnnnnnnnnnnnnnnnnnnnnnnnnnnnnnnnnnnnnnnnnnnnnnnnnnnnnnnnnnnnnnnnnnnnnnnnnnnnnnnnnnnnnnnnnnnnnnnnnnnnnnnnnnnnnnnnnnnnnnnnnnnnnnnnnnnnnnnnnnnnnnnnnnnnnnnnnnnnnnnnnnnnnnnnnnnnnnnnnnnnnnnnnnnnnnnnnnnnnnnnnnnnnnnnnnnnnnnnnnnnnnnnnnnnnnnnnnnnnnnnnnnnnnnnnnnnnnnnnnnnnnnnnnnnnnnnnnnnnnnnnnnnnnnnnnnnnnnnnnnnnnnnnnnnnnnnnnnnnnnnnnnnnnnnnnnnnnnnnnnnnnnnnnnnnnnnnnnnnnnnnnnnnnnnnnnnnnnnnnnnnnnnnnnnnnnnnnnnnnnnnnnnnnnnnnnnnnnnnnnnnnnnnnnnnnnnnnnnnnnnnnnnnnnnnnnnnnnnnnnnnnnnnnnnnnnnnnnnnnnnnnnnnnnnnnnnnnnnnnnnnnnnnnnnnnnnnnnnnnnnnnnnnnnnnnnnnnnnnnnnnnnnnnnnnnnnnnnnnnnnnnnnnnnnnnnnnnnnnnnnnnnnnnnnnnnnnnnnnnnnnnnnnnnnnnnnnnnnnnnnnnnnnnnnnnnnnnnnnnnnnnnnnnnnnnnnnnnnnnnnnnnnnnnnnnnnnnnnnnnnnnnnnnnnnnnnnnnnnnnnnnnnnnnnnnnnnnnnnnnnnnnnnnnnnnnnnnnnnnnnnnnnnnnnnnnnnnnnnnnnnnnnnnnnnnnnnnnnnnnnnnnnnnnnnnnnnnnnnnnnnnnnnnnnnnnnnnnnnnnnnnnnnnnnnnnnnnnnnnnnnnnnnnnnnnnnnnnnnnnnnnnnnnnnnnnnnnnnnnnnnnnnnnnnnnnnnnnnnnnnnnnnnnnnnnnnnnnnnnnnnnnnnnnnnnnnnnnnnnnnnnnnnnnnnnnnnnnnnnnnnnnnnnnnnnnnnnnnnnnnnnnnnnnnnnnnnnnnnnnnnnnnnnnnnnnnnnnnnnnnnnnnnnnnnnnnnnnnnnnnnnnnnnnnnnnnnnnnnnnnnnnnnnnnnnnnnnnnnnnnnnnnnnnnnnnnnnnnnnnnnnnnnnnnnnnnnnnnnnnnnnnnnnnnnnnnnnnnnnnnnnnnnnnnnnnnnnnnnnnnnnnnnnnnnnnnnnnnnnnnnnnnnnnnnnnnnnnnnnnnnnnnnnnnnnnnnnnnnnnnnnnnnnnnnnnnnnnnnnnnnnnnnnnnnnnnnnnnnnnnnnnnnnnnnnnnnnnnnnnnnnnnnnnnnnnnnnnnnnnnnnnnnnnnnnnnnnnnnnnnnnnnnnnnnnnnnnnnnnnnnnnnnnnnnnnnnnnnnnnnnnnnnnnnnnnnnnnnnnnnnnnnnnnnnnnnnnnnnnnnnnnnnnnnnnnnnnnnnnnnnnnnnnnnnnnnnnnnnnnnnnnnnnnnnnnnnnnnnnnnnnnnnnnnnnnnnnnnnnnnnnnnnnnnnnnnnnnnnnnnnnnnnnnnnnnnnnnnnnnnnnnnnnnnnnnnnnnnnnnnnnnnnnnnnnnnnnnnnnnnnnnnnnnnnnnnnnnnnnnnnnnnnnnnnnnnnnnnnnnnnnnnnnnnnnnnnnnnnnnnnnnnnnnnnnnnnnnnnnnnnnnnnnnnnnnnnnnnnnnnnnnnnnnnnnnnnnnnnnnnnnnnnnnnnnnnnnnnnnnnnnnnnnnnnnnnnnnnnnnnnnnnnnnnnnnnnnnnnnnnnnnnnnnnnnnnnnnnnnnnnnnnnnnnnnnnnnnnnnnnnnnnnnnnnnnnnnnnnnnnnnnnnnnnnnnnnnnnnnnnnnnnnnnnnnnnnnnnnnnnnnnnnnnnnnnnnnnnnnnnnnnnnnnnnnnnnnnnnnnnnnnnnnnnnnnnnnnnnnnnnnnnnnnnnnnnnnnnnnnnnnnnnnnnnnnnnnnnnnnnnnnnnnnnnnnnnnnnnnnnnnnnnnnnnnnnnnnnnnnnnnnnnnnnnnnnnnnnnnnnnnnnnnnnnnnnnnnnnnnnnnnnnnnnnnnnnnnnnnnnnnnnnnnnnnnnnnnnnnnnnnnnnnnnnnnnnnnnnnnnnnnnnnnnnnnnnnnnnnnnnnnnnnnnnnnnnnnnnnnnnnnnnnnnnnnnnnnnnnnnnnnnnnnnnnnnnnnnnnnnnnnnnnnnnnnnnnnnnnnnnnnnnnnnnnnnnnnnnnnnnnnnnnnnnnnnnnnnnnnnnnnnnnnnnnnnnnnnnnnnnnnnnnnnnnnnnnnnnnnnnnnnnnnnnnnnnnnnnnnnnnnnnnnnnnnnnnnnnnnnnnnnnnnnnnnnnnnnnnnnnnnnnnnnnnnnnnnnnnnnnnnnnnnnnnnnnnnnnnnnnnnnnnnnnnnnnnnnnnnnnnnnnnnnnnnnnnnnnnnnnnnnnnnnnnnnnnnnnnnnnnnnnnnnnnnnnnnnnnnnnnnnnnnnnnnnnnnnnnnnnnnnnnnnnnnnnnnnnnnnnnnnnnnnnnnnnnnnnnnnnnnnnnnnnnnnnnnnnnnnnnnnnnnnnnnnnnnnnnnnnnnnnnnnnnnnnnnnnnnnnnnnnnnnnnnnnnnnnnnnnnnnnnnnnnnnnnnnnnnnnnnnnnnnnnnnnnnnnnnnnnnnnnnnnnnnnnnnnnnnnnnnnnnnnnnnnnnnnnnnnnnnnnnnnnnnnnnnnnnnnnnnnnnnnnnnnnnnnnnnnnnnnnnnnnnnnnnnnnnnnnnnnnnnnnnnnnnnnnnnnnnnnnnnnnnnnnnnnnnnnnnnnnnnnnnnnnnnnnnnnnnnnnnnnnnnnnnnnnnnnnnnnnnnnnnnnnnnnnnnnnnnnnnnnnnnnnnnnnnnnnnnnnnnnnnnnnnnnnnnnnnnnnnnnnnnnnnnnnnnnnnnnnnnnnnnnnnnnnnnnnnnnnnnnnnnnnnnnnnnnnnnnnnnnnnnnnnnnnnnnnnnnnnnnnnnnnnnnnnnnnnnnnnnnnnnnnnnnnnnnnnnnnnnnnnnnnnnnnnnnnnnnnnnnnnnnnnnnnnnnnnnnnnnnnnnnnnnnnnnnnnnnnnnnnnnnnnnnnnnnnnnnnnnnnnnnnnnnnnnnnnnnnnnnnnnnnnnnnnnnnnnnnnnnnnnnnnnnnnnnnnnnnnnnnnnnnnnnnnnnnnnnnnnnnnnnnnnnnnnnnnnnnnnnnnnnnnnnnnnnnnnnnnnnnnnnnnnnnnnnnnnnnnnnnnnnnnnnnnnnnnnnnnnnnnnnnnnnnnnnnnnnnnnnnnnnnnnnnnnnnnnnnnnnnnnnnnnnnnnnnnnnnnnnnnnnnnnnnnnnnnnnnnnnnnnnnnnnnnnnnnnnnnnnnnnnnnnnnnnnnnnnnnnnnnnnnnnnnnnnnnnnnnnnnnnnnnnnnnnnnnnnnnnnnnnnnnnnnnnnnnnnnnnnnnnnnnnnnnnnnnnnnnnnnnnnnnnnnnnnnnnnnnnnnnnnnnnnnnnnnnnnnnnnnnnnnnnnnnnnnnnnnnnnnnnnnnnnnnnnnnnnnnnnnnnnnnnnnnnnnnnnnnnnnnnnnnnnnnnnnnnnnnnnnnnnnnnnnnnnnnnnnnnnnnnnnnnnnnnnnnnnnnnnnnnnnnnnnnnnnnnnnnnnnnnnnnnnnnnnnnnnnnnnnnnnnnnnnnnnnnnnnnnnnnnnnnnnnnnnnnnnnnnnnnnnnnnnnnnnnnnnnnnnnnnnnnnnnnnnnnnnnnnnnnnnnnnnnnnnnnnnnnnnnnnnnnnnnnnnnnnnnnnnnnnnnnnnnnnnnnnnnnnnnnnnnnnnnnnnnnnnnnnnnnnnnnnnnnnnnnnnnnnnnnnnnnnnnnnnnnnnnnnnnnnnnnnnnnnnnnnnnnnnnnnnnnnnnnnnnnnnnnnnnnnnnnnnnnnnnnnnnnnnnnnnnnnnnnnnnnnnnnnnnnnnnnnnnnnnnnnnnnnnnnnnnnnnnnnnnnnnnnnnnnnnnnnnnnnnnnnnnnnnnnnnnnnnnnnnnnnnnnnnnnnnnnnnnnnnnnnnnnnnnnnnnnnnnnnnnnnnnnnnnnnnnnnnnnnnnnnnnnnnnnnnnnnnnnnnnnnnnnnnnnnnnnnnnnnnnnnnnnnnnnnnnnnnnnnnnnnnnnnnnnnnnnnnnnnnnnnnnnnnnnnnnnnnnnnnnnnnnnnnnnnnnnnnnnnnnnnnnnnnnnnnnnnnnnnnnnnnnnnnnnnnnnnnnnnnnnnnnnnnnnnnnnnnnnnnnnnnnnnnnnnnnnnnnnnnnnnnnnnnnnnnnnnnnnnnnnnnnnnnnnnnnnnnnnnnnnnnnnnnnnnnnnnnnnnnnnnnnnnnnnnnnnnnnnnnnnnnnnnnnnnnnnnnnnnnnnnnnnnnnnnnnnnnnnnnnnnnnnnnnnnnnnnnnnnnnnnnnnnnnnnnnnnnnnnnnnnnnnnnnnnnnnnnnnnnnnnnnnnnnnnnnnnnnnnnnnnnnnnnnnnnnnnnnnnnnnnnnnnnnnnnnnnnnnnnnnnnnnnnnnnnnnnnnnnnnnnnnnnnnnnnnnnnnnnnnnnnnnnnnnnnnnnnnnnnnnnnnnnnnnnnnnnnnnnnnnnnnnnnnnnnnnnnnnnnnnnnnnnnnnnnnnnnnnnnnnnnnnnnnnnnnnnnnnnnnnnnnnnnnnnnnnnnnnnnnnnnnnnnnnnnnnnnnnnnnnnnnnnnnnnnnnnnnnnnnnnnnnnnnnnnnnnnnnnnnnnnnnnnnnnnnnnnnnnnnnnnnnnnnnnnnnnnnnnnnnnnnnnnnnnnnnnnnnnnnnnnnnnnnnnnnnnnnnnnnnnnnnnnnnnnnnnnnnnnnnnnnnnnnnnnnnnnnnnnnnnnnnnnnnnnnnnnnnnnnnnnnnnnnnnnnnnnnnnnnnnnnnnnnnnnnnnnnnnnnnnnnnnnnnnnnnnnnnnnnnnnnnnnnnnnnnnnnnnnnnnnnnnnnnnnnnnnnnnnnnnnnnnnnnnnnnnnnnnnnnnnnnnnnnnnnnnnnnnnnnnnnnnnnnnnnnnnnnnnnnnnnnnnnnnnnnnnnnnnnnnnnnnnnnnnnnnnnnnnnnnnnnnnnnnnnnnnnnnnnnnnnnnnnnnnnnnnnnnnnnnnnnnnnnnnnnnnnnnnnnnnnnnnnnnnnnnnnnnnnnnnnnnnnnnnnnnnnnnnnnnnnnnnnnnnnnnnnnnnnnnnnnnnnnnnnnnnnnnnnnnnnnnnnnnnnnnnnnnnnnnnnnnnnnnnnnnnnnnnnnnnnnnnnnnnnnnnnnnnnnnnnnnnnnnnnnnnnnnnnnnnnnnnnnnnnnnnnnnnnnnnnnnnnnnnnnnnnnnnnnnnnnnnnnnnnnnnnnnnnnnnnnnnnnnnnnnnnnnnnnnnnnnnnnnnnnnnnnnnnnnnnnnnnnnnnnnnnnnnnnnnnnnnnnnnnnnnnnnnnnnnnnnnnnnnnnnnnnnnnnnnnnnnnnnnnnnnnnnnnnnnnnnnnnnnnnnnnnnnnnnnnnnnnnnnnnnnnnnnnnnnnnnnnnnnnnnnnnnnnnnnnnnnnnnnnnnnnnnnnnnnnnnnnnnnnnnnnnnnnnnnnnnnnnnnnnnnnnnnnnnnnnnnnnnnnnnnnnnnnnnnnnnnnnnnnnnnnnnnnnnnnnnnnnnnnnnnnnnnnnnnnnnnnnnnnnnnnnnnnnnnnnnnnnnnnnnnnnnnnnnnnnnnnnnnnnnnnnnnnnnnnnnnnnnnnnnnnnnnnnnnnnnnnnnnnnnnnnnnnnnnnnnnnnnnnnnnnnnnnnnnnnnnnnnnnnnnnnnnnnnnnnnnnnnnnnnnnnnnnnnnnnnnnnnnnnnnnnnnnnnnnnnnnnnnnnnnnnnnnnnnnnnnnnnnnnnnnnnnnnnnnnnnnnnnnnnnnnnnnnnnnnnnnnnnnnnnnnnnnnnnnnnnnnnnnnnnnnnnnnnnnnnnnnnnnnnnnnnnnnnnnnnnnnnnnnnnnnnnnnnnnnnnnnnnnnnnnnnnnnnnnnnnnnnnnnnnnnnnnnnnnnnnnnnnnnnnnnnnnnnnnnnnnnnnnnnnnnnnnnnnnnnnnnnnnnnnnnnnnnnnnnnnnnnnnnnnnnnnnnnnnnnnnnnnnnnnnnnnnnnnnnnnnnnnnnnnnnnnnnnnnnnnnnnnnnnnnnnnnnnnnnnnnnnnnnnnnnnnnnnnnnnnnnnnnnnnnnnnnnnnnnnnnnnnnnnnnnnnnnnnnnnnnnnnnnnnnnnnnnnnnnnnnnnnnnnnnnnnnnnnnnnnnnnnnnnnnnnnnnnnnnnnnnnnnnnnnnnnnnnnnnnnnnnnnnnnnnnnnnnnnnnnnnnnnnnnnnnnnnnnnnnnnnnnnnnnnnnnnnnnnnnnnnnnnnnnnnnnnnnnnnnnnnnnnnnnnnnnnnnnnnnnnnnnnnnnnnnnnnnnnnnnnnnnnnnnnnnnnnnnnnnnnnnnnnnnnnnnnnnnnnnnnnnnnnnnnnnnnnnnnnnnnnnnnnnnnnnnnnnnnnnnnnnnnnnnnnnnnnnnnnnnnnnnnnnnnnnnnnnnnnnnnnnnnnnnnnnnnnnnnnnnnnnnnnnnnnnnnnnnnnnnnnnnnnnnnnnnnnnnnnnnnnnnnnnnnnnnnnnnnnnnnnnnnnnnnnnnnnnnnnnnnnnnnnnnnnnnnnnnnnnnnnnnnnnnnnnnnnnnnnnnnnnnnnnnnnnnnnnnnnnnnnnnnnnnnnnnnnnnnnnnnnnnnnnnnnnnnnnnnnnnnnnnnnnnnnnnnnnnnnnnnnnnnnnnnnnnnnnnnnnnnnnnnnnnnnnnnnnnnnnnnnnnnnnnnnnnnnnnnnnnnnnnnnnnnnnnnnnnnnnnnnnnnnnnnnnnnnnnnnnnnnnnnnnnnnnnnnnnnnnnnnnnnnnnnnnnnnnnnnnnnnnnnnnnnnnnnnnnnnnnnnnnnnnnnnnnnnnnnnnnnnnnnnnnnnnnnnnnnnnnnnnnnnnnnnnnnnnnnnnnnnnnnnnnnnnnnnnnnnnnnnnnnnnnnnnnnnnnnnnnnnnnnnnnnnnnnnnnnnnnnnnnnnnnnnnnnnnnnnnnnnnnnnnnnnnnnnnnnnnnnnnnnnnnnnnnnnnnnnnnnnnnnnnnnnnnnnnnnnnnnnnnnnnnnnnnnnnnnnnnnnnnnnnnnnnnnnnnnnnnnnnnnnnnnnnnnnnnnnnnnnnnnnnnnnnnnnnnnnnnnnnnnnnnnnnnnnnnnnnnnnnnnnnnnnnnnnnnnnnnnnnnnnnnnnnnnnnnnnnnnnnnnnnnnnnnnnnnnnnnnnnnnnnnnnnnnnnnnnnnnnnnnnnnnnnnnnnnnnnnnnnnnnnnnnnnnnnnnnnnnnnnnnnnnnnnnnnnnnnnnnnnnnnnnnnnnnnnnnnnnnnnnnnnnnnnnnnnnnnnnnnnnnnnnnnnnnnnnnnnnnnnnnnnnnnnnnnnnnnnnnnnnnnnnnnnnnnnnnnnnnnnnnnnnnnnnnnnnnnnnnnnnnnnnnnnnnnnnnnnnnnnnnnnnnnnnnnnnnnnnnnnnnnnnnnnnnnnnnnnnnnnnnnnnnnnnnnnnnnnnnnnnnnnnnnnnnnnnnnnnnnnnnnnnnnnnnnnnnnnnnnnnnnnnnnnnnnnnnnnnnnnnnnnnnnnnnnnnnnnnnnnnnnnnnnnnnnnnnnnnnnnnnnnnnnnnnnnnnnnnnnnnnnnnnnnnnnnnnnnnnnnnnnnnnnnnnnnnnnnnnnnnnnnnnnnnnnnnnnnnnnnnnnnnnnnnnnnnnnnnnnnnnnnnnnnnnnnnnnnnnnnnnnnnnnnnnnnnnnnnnnnnnnnnnnnnnnnnnnnnnnnnnnnnnnnnnnnnnnnnnnnnnnnnnnnnnnnnnnnnnnnnnnnnnnnnnnnnnnnnnnnnnnnnnnnnnnnnnnnnnnnnnnnnnnnnnnnnnnnnnnnnnnnnnnnnnnnnnnnnnnnnnnnnnnnnnnnnnnnnnnnnnnnnnnnnnnnnnnnnnnnnnnnnnnnnnnnnnnnnnnnnnnnnnnnnnnnnnnnnnnnnnnnnnnnnnnnnnnnnnnnnnnnnnnnnnnnnnnnnnnnnnnnnnnnnnnnnnnnnnnnnnnnnnnnnnnnnnnnnnnnnnnnnnnnnnnnnnnnnnnnnnnnnnnnnnnnnnnnnnnnnnnnnnnnnnnnnnnnnnnnnnnnnnnnnnnnnnnnnnnnnnnnnnnnnnnnnnnnnnnnnnnnnnnnnnnnnnnnnnnnnnnnnnnnnnnnnnnnnnnnnnnnnnnnnnnnnnnnnnnnnnnnnnnnnnnnnnnnnnnnnnnnnnnnnnnnnnnnnnnnnnnnnnnnnnnnnnnnnnnnnnnnnnnnnnnnnnnnnnnnnnnnnnnnnnnnnnnnnnnnnnnnnnnnnnnnnnnnnnnnnnnnnnnnnnnnnnnnnnnnnnnnnnnnnnnnnnnnnnnnnnnnnnnnnnnnnnnnnnnnnnnnnnnnnnnnnnnnnnnnnnnnnnnnnnnnnnnnnnnnnnnnnnnnnnnnnnnnnnnnnnnnnnnnnnnnnnnnnnnnnnnnnnnnnnnnnnnnnnnnnnnnnnnnnnnnnnnnnnnnnnnnnnnnnnnnnnnnnnnnnnnnnnnnnnnnnnnnnnnnnnnnnnnnnnnnnnnnnnnnnnnnnnnnnnnnnnnnnnnnnnnnnnnnnnnnnnnnnnnnnnnnnnnnnnnnnnnnnnnnnnnnnnnnnnnnnnnnnnnnnnnnnnnnnnnnnnnnnnnnnnnnnnnnnnnnnnnnnnnnnnnnnnnnnnnnnnnnnnnnnnnnnnnnnnnnnnnnnnnnnnnnnnnnnnnnnnnnnnnnnnnnnnnnnnnnnnnnnnnnnnnnnnnnnnnnnnnnnnnnnnnnnnnnnnnnnnnnnnnnnnnnnnnnnnnnnnnnnnnnnnnnnnnnnnnnnnnnnnnnnnnnnnnnnnnnnnnnnnnnnnnnnnnnnnnnnnnnnnnnnnnnnnnnnnnnnnnnnnnnnnnnnnnnnnnnnnnnnnnnnnnnnnnnnnnnnnnnnnnnnnnnnnnnnnnnnnnnnnnnnnnnnnnnnnnnnnnnnnnnnnnnnnnnnnnnnnnnnnnnnnnnnnnnnnnnnnnnnnnnnnnnnnnnnnnnnnnnnnnnnnnnnnnnnnnnnnnnnnnnnnnnnnnnnnnnnnnnnnnnnnnnnnnnnnnnnnnnnnnnnnnnnnnnnnnnnnnnnnnnnnnnnnnnnnnnnnnnnnnnnnnnnnnnnnnnnnnnnnnnnnnnnnnnnnnnnnnnnnnnnnnnnnnnnnnnnnnnnnnnnnnnnnnnnnnnnnnnnnnnnnnnnnnnnnnnnnnnnnnnnnnnnnnnnnnnnnnnnnnnnnnnnnnnnnnnnnnnnnnnnnnnnnnnnnnnnnnnnnnnnnnnnnnnnnnnnnnnnnnnnnnnnnnnnnnnnnnnnnnnnnnnnnnnnnnnnnnnnnnnnnnnnnnnnnnnnnnnnnnnnnnnnnnnnnnnnnnnnnnnnnnnnnnnnnnnnnnnnnnnnnnnnnnnnnnnnnnnnnnnnnnnnnnnnnnnnnnnnnnnnnnnnnnnnnnnnnnnnnnnnnnnnnnnnnnnnnnnnnnnnnnnnnnnnnnnnnnnnnnnnnnnnnnnnnnnnnnnnnnnnnnnnnnnnnnnnnnnnnnnnnnnnnnnnnnnnnnnnnnnnnnnnnnnnnnnnnnnnnnnnnnnnnnnnnnnnnnnnnnnnnnnnnnnnnnnnnnnnnnnnnnnnnnnnnnnnnnnnnnnnnnnnnnnnnnnnnnnnnnnnnnnnnnnnnnnnnnnnnnnnnnnnnnnnnnnnnnnnnnnnnnnnnnnnnnnnnnnnnnnnnnnnnnnnnnnnnnnnnnnnnnnnnnnnnnnnnnnnnnnnnnnnnnnnnnnnnnnnnnnnnnnnnnnnnnnnnnnnnnnnnnnnnnnnnnnnnnnnnnnnnnnnnnnnnnnnnnnnnnnnnnnnnnnnnnnnnnnnnnnnnnnnnnnnnnnnnnnnnnnnnnnnnnnnnnnnnnnnnnnnnnnnnnnnnnnnnnnnnnnnnnnnnnnnnnnnnnnnnnnnnnnnnnnnnnnnnnnnnnnnnnnnnnnnnnnnnnnnnnnnnnnnnnnnnnnnnnnnnnnnnnnnnnnnnnnnnnnnnnnnnnnnnnnnnnnnnnnnnnnnnnnnnnnnnnnnnnnnnnnnnnnnnnnnnnnnnnnnnnnnnnnnnnnnnnnnnnnnnnnnnnnnnnnnnnnnnnnnnnnnnnnnnnnnnnnnnnnnnnnnnnnnnnnnnnnnnnnnnnnnnnnnnnnnnnnnnnnnnnnnnnnnnnnnnnnnnnnnnnnnnnnnnnnnnnnnnnnnnnnnnnnnnnnnnnnnnnnnnnnnnnnnnnnnnnnnnnnnnnnnnnnnnnnnnnnnnnnnnnnnnnnnnnnnnnnnnnnnnnnnnnnnnnnnnnnnnnnnnnnnnnnnnnnnnnnnnnnnnnnnnnnnnnnnnnnnnnnnnnnnnnnnnnnnnnnnnnnnnnnnnnnnnnnnnnnnnnnnnnnnnnnnnnnnnnnnnnnnnnnnnnnnnnnnnnnnnnnnnnnnnnnnnnnnnnnnnnnnnnnnnnnnnnnnnnnnnnnnnnnnnnnnnnnnnnnnnnnnnnnnnnnnnnnnnnnnnnnnnnnnnnnnnnnnnnnnnnnnnnnnnnnnnnnnnnnnnnnnnnnnnnnnnnnnnnnnnnnnnnnnnnnnnnnnnnnnnnnnnnnnnnnnnnnnnnnnnnnnnnnnnnnnnnnnnnnnnnnnnnnnnnnnnnnnnnnnnnnnnnnnnnnnnnnnnnnnnnnnnnnnnnnnnnnnnnnnnnnnnnnnnnnnnnnnnnnnnnnnnnnnnnnnnnnnnnnnnnnnnnnnnnnnnnnnnnnnnnnnnnnnnnnnnnnnnnnnnnnnnnnnnnnnnnnnnnnnnnnnnnnnnnnnnnnnnnnnnnnnnnnnnnnnnnnnnnnnnnnnnnnnnnnnnnnnnnnnnnnnnnnnnnnnnnnnnnnnnnnnnnnnnnnnnnnnnnnnnnnnnnnnnnnnnnnnnnnnnnnnnnnnnnnnnnnnnnnnnnnnnnnnnnnnnnnnnnnnnnnnnnnnnnnnnnnnnnnnnnnnnnnnnnnnnnnnnnnnnnnnnnnnnnnnnnnnnnnnnnnnnnnnnnnnnnnnnnnnnnnnnnnnnnnnnnnnnnnnnnnnnnnnnnnnnnnnnnnnnnnnnnnnnnnnnnnnnnnnnnnnnnnnnnnnnnnnnnnnnnnnnnnnnnnnnnnnnnnnnnnnnnnnnnnnnnnnnnnnnnnnnnnnnnnnnnnnnnnnnnnnnnnnnnnnnnnnnnnnnnnnnnnnnnnnnnnnnnnnnnnnnnnnnnnnnnnnnnnnnnnnnnnnnnnnnnnnnnnnnnnnnnnnnnnnnnnnnnnnnnnnnnnnnnnnnnnnnnnnnnnnnnnnnnnnnnnnnnnnnnnnnnnnnnnnnnnnnnnnnnnnnnnnnnnnnnnnnnnnnnnnnnnnnnnnnnnnnnnnnnnnnnnnnnnnnnnnnnnnnnnnnnnnnnnnnnnnnnnnnnnnnnnnnnnnnnnnnnnnnnnnnnnnnnnnnnnnnnnnnnnnnnnnnnnnnnnnnnnnnnnnnnnnnnnnnnnnnnnnnnnnnnnnnnnnnnnnnnnnnnnnnnnnnnnnnnnnnnnnnnnnnnnnnnnnnnnnnnnnnnnnnnnnnnnnnnnnnnnnnnnnnnnnnnnnnnnnnnnnnnnnnnnnnnnnnnnnnnnnnnnnnnnnnnnnnnnnnnnnnnnnnnnnnnnnnnnnnnnnnnnnnnnnnnnnnnnnnnnnnnnnnnnnnnnnnnnnnnnnnnnnnnnnnnnnnnnnnnnnnnnnnnnnnnnnnnnnnnnnnnnnnnnnnnnnnnnnnnnnnnnnnnnnnnnnnnnnnnnnnnnnnnnnnnnnnnnnnnnnnnnnnnnnnnnnnnnnnnnnnnnnnnnnnnnnnnnnnnnnnnnnnnnnnnnnnnnnnnnnnnnnnnnnnnnnnnnnnnnnnnnnnnnnnnnnnnnnnnnnnnnnnnnnnnnnnnnnnnnnnnnnnnnnnnnnnnnnnnnnnnnnnnnnnnnnnnnnnnnnnnnnnnnnnnnnnnnnnnnnnnnnnnnnnnnnnnnnnnnnnnnnnnnnnnnnnnnnnnnnnnnnnnnnnnnnnnnnnnnnnnnnnnnnnnnnnnnnnnnnnnnnnnnnnnnnnnnnnnnnnnnnnnnnnnnnnnnnnnnnnnnnnnnnnnnnnnnnnnnnnnnnnnnnnnnnnnnnnnnnnnnnnnnnnnnnnnnnnnnnnnnnnnnnnnnnnnnnnnnnnnnnnnnnnnnnnnnnnnnnnnnnnnnnnnnnnnnnnnnnnnnnnnnnnnnnnnnnnnnnnnnnnnnnnnnnnnnnnnnnnnnnnnnnnnnnnnnnnnnnnnnnnnnnnnnnnnnnnnnnnnnnnnnnnnnnnnnnnnnnnnnnnnnnnnnnnnnnnnnnnnnnnnnnnnnnnnnnnnnnnnnnnnnnnnnnnnnnnnnnnnnnnnnnnnnnnnnnnnnnnnnnnnnnnnnnnnnnnnnnnnnnnnnnnnnnnnnnnnnnnnnnnnnnnnnnnnnnnnnnnnnnnnnnnnnnnnnnnnnnnnnnnnnnnnnnnnnnnnnnnnnnnnnnnnnnnnnnnnnnnnnnnnnnnnnnnnnnnnnnnnnnnnnnnnnnnnnnnnnnnnnnnnnnnnnnnnnnnnnnnnnnnnnnnnnnnnnnnnnnnnnnnnnnnnnnnnnnnnnnnnnnnnnnnnnnnnnnnnnnnnnnnnnnnnnnnnnnnnnnnnnnnnnnnnnnnnnnnnnnnnnnnnnnnnnnnnnnnnnnnnnnnnnnnnnnnnnnnnnnnnnnnnnnnnnnnnnnnnnnnnnnnnnnnnnnnnnnnnnnnnnnnnnnnnnnnnnnnnnnnnnnnnnnnnnnnnnnnnnnnnnnnnnnnnnnnnnnnnnnnnnnnnnnnnnnnnnnnnnnnnnnnnnnnnnnnnnnnnnnnnnnnnnnnnnnnnnnnnnnnnnnnnnnnnnnnnnnnnnnnnnnnnnnnnnnnnnnnnnnnnnnnnnnnnnnnnnnnnnnnnnnnnnnnnnnnnnnnnnnnnnnnnnnnnnnnnnnnnnnnnnnnnnnnnnnnnnnnnnnnnnnnnnnnnnnnnnnnnnnnnnnnnnnnnnnnnnnnnnnnnnnnnnnnnnnnnnnnnnnnnnnnnnnnnnnnnnnnnnnnnnnnnnnnnnnnnnnnnnnnnnnnnnnnnnnnnnnnnnnnnnnnnnnnnnnnnnnnnnnnnnnnnnnnnnnnnnnnnnnnnnnnnnnnnnnnnnnnnnnnnnnnnnnnnnnnnnnnnnnnnnnnnnnnnnnnnnnnnnnnnnnnnnnnnnnnnnnnnnnnnnnnnnnnnnnnnnnnnnnnnnnnnnnnnnnnnnnnnnnnnnnnnnnnnnnnnnnnnnnnnnnnnnnnnnnnnnnnnnnnnnnnnnnnnnnnnnnnnnnnnnnnnnnnnnnnnnnnnnnnnnnnnnnnnnnnnnnnnnnnnnnnnnnnnnnnnnnnnnnnnnnnnnnnnnnnnnnnnnnnnnnnnnnnnnnnnnnnnnnnnnnnnnnnnnnnnnnnnnnnnnnnnnnnnnnnnnnnnnnnnnnnnnnnnnnnnnnnnnnnnnnnnnnnnnnnnnnnnnnnnnnnnnnnnnnnnnnnnnnnnnnnnnnnnnnnnnnnnnnnnnnnnnnnnnnnnnnnnnnnnnnnnnnnnnnnnnnnnnnnnnnnnnnnnnnnnnnnnnnnnnnnnnnnnnnnnnnnnnnnnnnnnnnnnnnnnnnnnnnnnnnnnnnnnnnnnnnnnnnnnnnnnnnnnnnnnnnnnnnnnnnnnnnnnnnnnnnnnnnnnnnnnnnnnnnnnnnnnnnnnnnnnnnnnnnnnnnnnnnnnnnnnnnnnnnnnnnnnnnnnnnnnnnnnnnnnnnnnnnnnnnnnnnnnnnnnnnnnnnnnnnnnnnnnnnnnnnnnnnnnnnnnnnnnnnnnnnnnnnnnnnnnnnnnnnnnnnnnnnnnnnnnnnnnnnnnnnnnnnnnnnnnnnnnnnnnnnnnnnnnnnnnnnnnnnnnnnnnnnnnnnnnnnnnnnnnnnnnnnnnnnnnnnnnnnnnnnnnnnnnnnnnnnnnnnnnnnnnnnnnnnnnnnnnnnnnnnnnnnnnnnnnnnnnnnnnnnnnnnnnnnnnnnnnnnnnnnnnnnnnnnnnnnnnnnnnnnnnnnnnnnnnnnnnnnnnnnnnnnnnnnnnnnnnnnnnnnnnnnnnnnnnnnnnnnnnnnnnnnnnnnnnnnnnnnnnnnnnnnnnnnnnnnnnnnnnnnnnnnnnnnnnnnnnnnnnnnnnnnnnnnnnnnnnnnnnnnnnnnnnnnnnnnnnnnnnnnnnnnnnnnnnnnnnnnnnnnnnnnnnnnnnnnnnnnnnnnnnnnnnnnnnnnnnnnnnnnnnnnnnnnnnnnnnnnnnnnnnnnnnnnnnnnnnnnnnnnnnnnnnnnnnnnnnnnnnnnnnnnnnnnnnnnnnnnnnnnnnnnnnnnnnnnnnnnnnnnnnnnnnnnnnnnnnnnnnnnnnnnnnnnnnnnnnnnnnnnnnnnnnnnnnnnnnnnnnnnnnnnnnnnnnnnnnnnnnnnnnnnnnnnnnnnnnnnnnnnnnnnnnnnnnnnnnnnnnnnnnnnnnnnnnnnnnnnnnnnnnnnnnnnnnnnnnnnnnnnnnnnnnnnnnnnnnnnnnnnnnnnnnnnnnnnnnnnnnnnnnnnnnnnnnnnnnnnnnnnnnnnnnnnnnnnnnnnnnnnnnnnnnnnnnnnnnnnnnnnnnnnnnnnnnnnnnnnnnnnnnnnnnnnnnnnnnnnnnnnnnnnnnnnnnnnnnnnnnnnnnnnnnnnnnnnnnnnnnnnnnnnnnnnnnnnnnnnnnnnnnnnnnnnnnnnnnnnnnnnnnnnnnnnnnnnnnnnnnnnnnnnnnnnnnnnnnnnnnnnnnnnnnnnnnnnnnnnnnnnnnnnnnnnnnnnnnnnnnnnnnnnnnnnnnnnnnnnnnnnnnnnnnnnnnnnnnnnnnnnnnnnnnnnnnnnnnnnnnnnnnnnnnnnnnnnnnnnnnnnnnnnnnnnnnnnnnnnnnnnnnnnnnnnnnnnnnnnnnnnnnnnnnnnnnnnnnnnnnnnnnnnnnnnnnnnnnnnnnnnnnnnnnnnnnnnnnnnnnnnnnnnnnnnnnnnnnnnnnnnnnnnnnnnnnnnnnnnnnnnnnnnnnnnnnnnnnnnnnnnnnnnnnnnnnnnnnnnnnnnnnnnnnnnnnnnnnnnnnnnnnnnnnnnnnnnnnnnnnnnnnnnnnnnnnnnnnnnnnnnnnnnnnnnnnnnnnnnnnnnnnnnnnnnnnnnnnnnnnnnnnnnnnnnnnnnnnnnnnnnnnnnnnnnnnnnnnnnnnnnnnnnnnnnnnnnnnnnnnnnnnnnnnnnnnnnnnnnnnnnnnnnnnnnnnnnnnnnnnnnnnnnnnnnnnnnnnnnnnnnnnnnnnnnnnnnnnnnnnnnnnnnnnnnnnnnnnnnnnnnnnnnnnnnnnnnnnnnnnnnnnnnnnnnnnnnnnnnnnnnnnnnnnnnnnnnnnnnnnnnnnnnnnnnnnnnnnnnnnnnnnnnnnnnnnnnnnnnnnnnnnnnnnnnnnnnnnnnnnnnnnnnnnnnnnnnnnnnnnnnnnnnnnnnnnnnnnnnnnnnnnnnnnnnnnnnnnnnnnnnnnnnnnnnnnnnnnnnnnnnnnnnnnnnnnnnnnnnnnnnnnnnnnnnnnnnnnnnnnnnnnnnnnnnnnnnnnnnnnnnnnnnnnnnnnnnnnnnnnnnnnnnnnnnnnnnnnnnnnnnnnnnnnnnnnnnnnnnnnnnnnnnnnnnnnnnnnnnnnnnnnnnnnnnnnnnnnnnnnnnnnnnnnnnnnnnnnnnnnnnnnnnnnnnnnnnnnnnnnnnnnnnnnnnnnnnnnnnnnnnnnnnnnnnnnnnnnnnnnnnnnnnnnnnnnnnnnnnnnnnnnnnnnnnnnnnnnnnnnnnnnnnnnnnnnnnnnnnnnnnnnnnnnnnnnnnnnnnnnnnnnnnnnnnnnnnnnnnnnnnnnnnnnnnnnnnnnnnnnnnnnnnnnnnnnnnnnnnnnnnnnnnnnnnnnnnnnnnnnnnnnnnnnnnnnnnnnnnnnnnnnnnnnnnnnnnnnnnnnnnnnnnnnnnnnnnnnnnnnnnnnnnnnnnnnnnnnnnnnnnnnnnnnnnnnnnnnnnnnnnnnnnnnnnnnnnnnnnnnnnnnnnnnnnnnnnnnnnnnnnnnnnnnnnnnnnnnnnnnnnnnnnnnnnnnnnnnnnnnnnnnnnnnnnnnnnnnnnnnnnnnnnnnnnnnnnnnnnnnnnnnnnnnnnnnnnnnnnnnnnnnnnnnnnnnnnnnnnnnnnnnnnnnnnnnnnnnnnnnnnnnnnnnnnnnnnnnnnnnnnnnnnnnnnnnnnnnnnnnnnnnnnnnnnnnnnnnnnnnnnnnnnnnnnnnnnnnnnnnnnnnnnnnnnnnnnnnnnnnnnnnnnnnnnnnnnnnnnnnnnnnnnnnnnnnnnnnnnnnnnnnnnnnnnnnnnnnnnnnnnnnnnnnnnnnnnnnnnnnnnnnnnnnnnnnnnnnnnnnnnnnnnnnnnnnnnnnnnnnnnnnnnnnnnnnnnnnnnnnnnnnnnnnnnnnnnnnnnnnnnnnnnnnnnnnnnnnnnnnnnnnnnnnnnnnnnnnnnnnnnnnnnnnnnnnnnnnnnnnnnnnnnnnnnnnnnnnnnnnnnnnnnnnnnnnnnnnnnnnnnnnnnnnnnnnnnnnnnnnnnnnnnnnnnnnnnnnnnnnnnnnnnnnnnnnnnnnnnnnnnnnnnnnnnnnnnnnnnnnnnnnnnnnnnnnnnnnnnnnnnnnnnnnnnnnnnnnnnnnnnnnnnnnnnnnnnnnnnnnnnnnnnnnnnnnnnnnnnnnnnnnnnnnnnnnnnnnnnnnnnnnnnnnnnnnnnnnnnnnnnnnnnnnnnnnnnnnnnnnnnnnnnnnnnnnnnnnnnnnnnnnnnnnnnnnnnnnnnnnnnnnnnnnnnnnnnnnnnnnnnnnnnnnnnnnnnnnnnnnnnnnnnnnnnnnnnnnnnnnnnnnnnnnnnnnnnnnnnnnnnnnnnnnnnnnnnnnnnnnnnnnnnnnnnnnnnnnnnnnnnnnnnnnnnnnnnnnnnnnnnnnnnnnnnnnnnnnnnnnnnnnnnnnnnnnnnnnnnnnnnnnnnnnnnnnnnnnnnnnnnnnnnnnnnnnnnnnnnnnnnnnnnnnnnnnnnnnnnnnnnnnnnnnnnnnnnnnnnnnnnnnnnnnnnnnnnnnnnnnnnnnnnnnnnnnnnnnnnnnnnnnnnnnnnnnnnnnnnnnnnnnnnnnnnnnnnnnnnnnnnnnnnnnnnnnnnnnnnnnnnnnnnnnnnnnnnnnnnnnnnnnnnnnnnnnnnnnnnnnnnnnnnnnnnnnnnnnnnnnnnnnnnnnnnnnnnnnnnnnnnnnnnnnnnnnnnnnnnnnnnnnnnnnnnnnnnnnnnnnnnnnnnnnnnnnnnnnnnnnnnnnnnnnnnnnnnnnnnnnnnnnnnnnnnnnnnnnnnnnnnnnnnnnnnnnnnnnnnnnnnnnnnnnnnnnnnnnnnnnnnnnnnnnnnnnnnnnnnnnnnnnnnnnnnnnnnnnnnnnnnnnnnnnnnnnnnnnnnnnnnnnnnnnnnnnnnnnnnnnnnnnnnnnnnnnnnnnnnnnnnnnnnnnnnnnnnnnnnnnnnnnnnnnnnnnnnnnnnnnnnnnnnnnnnnnnnnnnnnnnnnnnnnnnnnnnnnnnnnnnnnnnnnnnnnnnnnnnnnnnnnnnnnnnnnnnnnnnnnnnnnnnnnnnnnnnnnnnnnnnnnnnnnnnnnnnnnnnnnnnnnnnnnnnnnnnnnnnnnnnnnnnnnnnnnnnnnnnnnnnnnnnnnnnnnnnnnnnnnnnnnnnnnnnnnnnnnnnnnnnnnnnnnnnnnnnnnnnnnnnnnnnnnnnnnnnnnnnnnnnnnnnnnnnnnnnnnnnnnnnnnnnnnnnnnnnnnnnnnnnnnnnnnnnnnnnnnnnnnnnnnnnnnnnnnnnnnnnnnnnnnnnnnnnnnnnnnnnnnnnnnnnnnnnnnnnnnnnnnnnnnnnnnnnnnnnnnnnnnnnnnnnnnnnnnnnnnnnnnnnnnnnnnnnnnnnnnnnnnnnnnnnnnnnnnnnnnnnnnnnnnnnnnnnnnnnnnnnnnnnnnnnnnnnnnnnnnnnnnnnnnnnnnnnnnnnnnnnnnnnnnnnnnnnnnnnnnnnnnnnnnnnnnnnnnnnnnnnnnnnnnnnnnnnnnnnnnnnnnnnnnnnnnnnnnnnnnnnnnnnnnnnnnnnnnnnnnnnnnnnnnnnnnnnnnnnnnnnnnnnnnnnnnnnnnnnnnnnnnnnnnnnnnnnnnnnnnnnnnnnnnnnnnnnnnnnnnnnnnnnnnnnnnnnnnnnnnnnnnnnnnnnnnnnnnnnnnnnnnnnnnnnnnnnnnnnnnnnnnnnnnnnnnnnnnnnnnnnnnnnnnnnnnnnnnnnnnnnnnnnnnnnnnnnnnnnnnnnnnnnnnnnnnnnnnnnnnnnnnnnnnnnnnnnnnnnnnnnnnnnnnnnnnnnnnnnnnnnnnnnnnnnnnnnnnnnnnnnnnnnnnnnnnnnnnnnnnnnnnnnnnnnnnnnnnnnnnnnnnnnnnnnnnnnnnnnnnnnnnnnnnnnnnnnnnnnnnnnnnnnnnnnnnnnnnnnnnnnnnnnnnnnnnnnnnnnnnnnnnnnnnnnnnnnnnnnnnnnnnnnnnnnnnnnnnnnnnnnnnnnnnnnnnnnnnnnnnnnnnnnnnnnnnnnnnnnnnnnnnnnnnnnnnnnnnnnnnnnnnnnnnnnnnnnnnnnnnnnnnnnnnnnnnnnnnnnnnnnnnnnnnnnnnnnnnnnnnnnnnnnnnnnnnnnnnnnnnnnnnnnnnnnnnnnnnnnnnnnnnnnnnnnnnnnnnnnnnnnnnnnnnnnnnnnnnnnnnnnnnnnnnnnnnnnnnnnnnnnnnnnnnnnnnnnnnnnnnnnnnnnnnnnnnnnnnnnnnnnnnnnnnnnnnnnnnnnnnnnnnnnnnnnnnnnnnnnnnnnnnnnnnnnnnnnnnnnnnnnnnnnnnnnnnnnnnnnnnnnnnnnnnnnnnnnnnnnnnnnnnnnnnnnnnnnnnnnnnnnnnnnnnnnnnnnnnnnnnnnnnnnnnnnnnnnnnnnnnnnnnnnnnnnnnnnnnnnnnnnnnnnnnnnnnnnnnnnnnnnnnnnnnnnnnnnnnnnnnnnnnnnnnnnnnnnnnnnnnnnnnnnnnnnnnnnnnnnnnnnnnnnnnnnnnnnnnnnnnnnnnnnnnnnnnnnnnnnnnnnnnnnnnnnnnnnnnnnnnnnnnnnnnnnnnnnnnnnnnnnnnnnnnnnnnnnnnnnnnnnnnnnnnnnnnnnnnnnnnnnnnnnnnnnnnnnnnnnnnnnnnnnnnnnnnnnnnnnnnnnnnnnnnnnnnnnnnnnnnnnnnnnnnnnnnnnnnnnnnnnnnnnnnnnnnnnnnnnnnnnnnnnnnnnnnnnnnnnnnnnnnnnnnnnnnnnnnnnnnnnnnnnnnnnnnnnnnnnnnnnnnnnnnnnnnnnnnnnnnnnnnnnnnnnnnnnnnnnnnnnnnnnnnnnnnnnnnnnnnnnnnnnnnnnnnnnnnnnnnnnnnnnnnnnnnnnnnnnnnnnnnnnnnnnnnnnnnnnnnnnnnnnnnnnnnnnnnnnnnnnnnnnnnnnnnnnnnnnnnnnnnnnnnnnnnnnnnnnnnnnnnnnnnnnnnnnnnnnnnnnnnnnnnnnnnnnnnnnnnnnnnnnnnnnnnnnnnnnnnnnnnnnnnnnnnnnnnnnnnnnnnnnnnnnnnnnnnnnnnnnnnnnnnnnnnnnnnnnnnnnnnnnnnnnnnnnnnnnnnnnnnnnnnnnnnnnnnnnnnnnnnnnnnnnnnnnnnnnnnnnnnnnnnnnnnnnnnnnnnnnnnnnnnnnnnnnnnnnnnnnnnnnnnnnnnnnnnnnnnnnnnnnnnnnnnnnnnnnnnnnnnnnnnnnnnnnnnnnnnnnnnnnnnnnnnnnnnnnnnnnnnnnnnnnnnnnnnnnnnnnnnnnnnnnnnnnnnnnnnnnnnnnnnnnnnnnnnnnnnnnnnnnnnnnnnnnnnnnnnnnnnnnnnnnnnnnnnnnnnnnnnnnnnnnnnnnnnnnnnnnnnnnnnnnnnnnnnnnnnnnnnnnnnnnnnnnnnnnnnnnnnnnnnnnnnnnnnnnnnnnnnnnnnnnnnnnnnnnnnnnnnnnnnnnnnnnnnnnnnnnnnnnnnnnnnnnnnnnnnnnnnnnnnnnnnnnnnnnnnnnnnnnnnnnnnnnnnnnnnnnnnnnnnnnnnnnnnnnnnnnnnnnnnnnnnnnnnnnnnnnnnnnnnnnnnnnnnnnnnnnnnnnnnnnnnnnnnnnnnnnnnnnnnnnnnnnnnnnnnnnnnnnnnnnnnnnnnnnnnnnnnnnnnnnnnnnnnnnnnnnnnnnnnnnnnnnnnnnnnnnnnnnnnnnnnnnnnnnnnnnnnnnnnnnnnnnnnnnnnnnnnnnnnnnnnnnnnnnnnnnnnnnnnnnnnnnnnnnnnnnnnnnnnnnnnnnnnnnnnnnnnnnnnnnnnnnnnnnnnnnnnnnnnnnnnnnnnnnnnnnnnnnnnnnnnnnnnnnnnnnnnnnnnnnnnnnnnnnnnnnnnnnnnnnnnnnnnnnnnnnnnnnnnnnnnnnnnnnnnnnnnnnnnnnnnnnnnnnnnnnnnnnnnnnnnnnnnnnnnnnnnnnnnnnnnnnnnnnnnnnnnnnnnnnnnnnnnnnnnnnnnnnnnnnnnnnnnnnnnnnnnnnnnnnnnnnnnnnnnnnnnnnnnnnnnnnnnnnnnnnnnnnnnnnnnnnnnnnnnnnnnnnnnnnnnnnnnnnnnnnnnnnnnnnnnnnnnnnnnnnnnnnnnnnnnnnnnnnnnnnnnnnnnnnnnnnnnnnnnnnnnnnnnnnnnnnnnnnnnnnnnnnnnnnnnnnnnnnnnnnnnnnnnnnnnnnnnnnnnnnnnnnnnnnnnnnnnnnnnnnnnnnnnnnnnnnnnnnnnnnnnnnnnnnnnnnnnnnnnnnnnnnnnnnnnnnnnnnnnnnnnnnnnnnnnnnnnnnnnnnnnnnnnnnnnnnnnnnnnnnnnnnnnnnnnnnnnnnnnnnnnnnnnnnnnnnnnnnnnnnnnnnnnnnnnnnnnnnnnnnnnnnnnnnnnnnnnnnnnnnnnnnnnnnnnnnnnnnnnnnnnnnnnnnnnnnnnnnnnnnnnnnnnnnnnnnnnnnnnnnnnnnnnnnnnnnnnnnnnnnnnnnnnnnnnnnnnnnnnnnnnnnnnnnnnnnnnnnnnnnnnnnnnnnnnnnnnnnnnnnnnnnnnnnnnnnnnnnnnnnnnnnnnnnnnnnnnnnnnnnnnnnnnnnnnnnnnnnnnnnnnnnnnnnnnnnnnnnnnnnnnnnnnnnnnnnnnnnnnnnnnnnnnnnnnnnnnnnnnnnnnnnnnnnnnnnnnnnnnnnnnnnnnnnnnnnnnnnnnnnnnnnnnnnnnnnnnnnnnnnnnnnnnnnnnnnnnnnnnnnnnnnnnnnnnnnnnnnnnnnnnnnnnnnnnnnnnnnnnnnnnnnnnnnnnnnnnnnnnnnnnnnnnnnnnnnnnnnnnnnnnnnnnnnnnnnnnnnnnnnnnnnnnnnnnnnnnnnnnnnnnnnnnnnnnnnnnnnnnnnnnnnnnnnnnnnnnnnnnnnnnnnnnnnnnnnnnnnnnnnnnnnnnnnnnnnnnnnnnnnnnnnnnnnnnnnnnnnnnnnnnnnnnnnnnnnnnnnnnnnnnnnnnnnnnnnnnnnnnnnnnnnnnnnnnnnnnnnnnnnnnnnnnnnnnnnnnnnnnnnnnnnnnnnnnnnnnnnnnnnnnnnnnnnnnnnnnnnnnnnnnnnnnnnnnnnnnnnnnnnnnnnnnnnnnnnnnnnnnnnnnnnnnnnnnnnnnnnnnnnnnnnnnnnnnnnnnnnnnnnnnnnnnnnnnnnnnnnnnnnnnnnnnnnnnnnnnnnnnnnnnnnnnnnnnnnnnnnnnnnnnnnnnnnnnnnnnnnnnnnnnnnnnnnnnnnnnnnnnnnnnnnnnnnnnnnnnnnnnnnnnnnnnnnnnnnnnnnnnnnnnnnnnnnnnnnnnnnnnnnnnnnnnnnnnnnnnnnnnnnnnnnnnnnnnnnnnnnnnnnnnnnnnnnnnnnnnnnnnnnnnnnnnnnnnnnnnnnnnnnnnnnnnnnnnnnnnnnnnnnnnnnnnnnnnnnnnnnnnnnnnnnnnnnnnnnnnnnnnnnnnnnnnnnnnnnnnnnnnnnnnnnnnnnnnnnnnnnnnnnnnnnnnnnnnnnnnnnnnnnnnnnnnnnnnnnnnnnnnnnnnnnnnnnnnnnnnnnnnnnnnnnnnnnnnnnnnnnnnnnnnnnnnnnnnnnnnnnnnnnnnnnnnnnnnnnnnnnnnnnnnnnnnnnnnnnnnnnnnnnnnnnnnnnnnnnnnnnnnnnnnnnnnnnnnnnnnnnnnnnnnnnnnnnnnnnnnnnnnnnnnnnnnnnnnnnnnnnnnnnnnnnnnnnnnnnnnnnnnnnnnnnnnnnnnnnnnnnnnnnnnnnnnnnnnnnnnnnnnnnnnnnnnnnnnnnnnnnnnnnnnnnnnnnnnnnnnnnnnnnnnnnnnnnnnnnnnnnnnnnnnnnnnnnnnnnnnnnnnnnnnnnnnnnnnnnnnnnnnnnnnnnnnnnnnnnnnnnnnnnnnnnnnnnnnnnnnnnnnnnnnnnnnnnnnnnnnnnnnnnnnnnnnnnnnnnnnnnnnnnnnnnnnnnnnnnnnnnnnnnnnnnnnnnnnnnnnnnnnnnnnnnnnnnnnnnnnnnnnnnnnnnnnnnnnnnnnnnnnnnnnnnnnnnnnnnnnnnnnnnnnnnnnnnnnnnnnnnnnnnnnnnnnnnnnnnnnnnnnnnnnnnnnnnnnnnnnnnnnnnnnnnnnnnnnnnnnnnnnnnnnnnnnnnnnnnnnnnnnnnnnnnnnnnnnnnnnnnnnnnnnnnnnnnnnnnnnnnnnnnnnnnnnnnnnnnnnnnnnnnnnnnnnnnnnnnnnnnnnnnnnnnnnnnnnnnnnnnnnnnnnnnnnnnnnnnnnnnnnnnnnnnnnnnnnnnnnnnnnnnnnnnnnnnnnnnnnnnnnnnnnnnnnnnnnnnnnnnnnnnnnnnnnnnnnnnnnnnnnnnnnnnnnnnnnnnnnnnnnnnnnnnnnnnnnnnnnnnnnnnnnnnnnnnnnnnnnnnnnnnnnnnnnnnnnnnnnnnnnnnnnnnnnnnnnnnnnnnnnnnnnnnnnnnnnnnnnnnnnnnnnnnnnnnnnnnnnnnnnnnnnnnnnnnnnnnnnnnnnnnnnnnnnnnnnnnnnnnnnnnnnnnnnnnnnnnnnnnnnnnnnnnnnnnnnnnnnnnnnnnnnnnnnnnnnnnnnnnnnnnnnnnnnnnnnnnnnnnnnnnnnnnnnnnnnnnnnnnnnnnnnnnnnnnnnnnnnnnnnnnnnnnnnnnnnnnnnnnnnnnnnnnnnnnnnnnnnnnnnnnnnnnnnnnnnnnnnnnnnnnnnnnnnnnnnnnnnnnnnnnnnnnnnnnnnnnnnnnnnnnnnnnnnnnnnnnnnnnnnnnnnnnnnnnnnnnnnnnnnnnnnnnnnnnnnnnnnnnnnnnnnnnnnnnnnnnnnnnnnnnnnnnnnnnnnnnnnnnnnnnnnnnnnnnnnnnnnnnnnnnnnnnnnnnnnnnnnnnnnnnnnnnnnnnnnnnnnnnnnnnnnnnnnnnnnnnnnnnnnnnnnnnnnnnnnnnnnnnnnnnnnnnnnnnnnnnnnnnnnnnnnnnnnnnnnnnnnnnnnnnnnnnnnnnnnnnnnnnnnnnnnnnnnnnnnnnnnnnnnnnnnnnnnnnnnnnnnnnnnnnnnnnnnnnnnnnnnnnnnnnnnnnnnnnnnnnnnnnnnnnnnnnnnnnnnnnnnnnnnnnnnnnnnnnnnnnnnnnnnnnnnnnnnnnnnnnnnnnnnnnnnnnnnnnnnnnnnnnnnnnnnnnnnnnnnnnnnnnnnnnnnnnnnnnnnnnnnnnnnnnnnnnnnnnnnnnnnnnnnnnnnnnnnnnnnnnnnnnnnnnnnnnnnnnnnnnnnnnnnnnnnnnnnnnnnnnnnnnnnnnnnnnnnnnnnnnnnnnnnnnnnnnnnnnnnnnnnnnnnnnnnnnnnnnnnnnnnnnnnnnnnnnnnnnnnnnnnnnnnnnnnnnnnnnnnnnnnnnnnnnnnnnnnnnnnnnnnnnnnnnnnnnnnnnnnnnnnnnnnnnnnnnnnnnnnnnnnnnnnnnnnnnnnnnnnnnnnnnnnnnnnnnnnnnnnnnnnnnnnnnnnnnnnnnnnnnnnnnnnnnnnnnnnnnnnnnnnnnnnnnnnnnnnnnnnnnnnnnnnnnnnnnnnnnnnnnnnnnnnnnnnnnnnnnnnnnnnnnnnnnnnnnnnnnnnnnnnnnnnnnnnnnnnnnnnnnnnnnnnnnnnnnnnnnnnnnnnnnnnnnnnnnnnnnnnnnnnnnnnnnnnnnnnnnnnnnnnnnnnnnnnnnnnnnnnnnnnnnnnnnnnnnnnnnnnnnnnnnnnnnnnnnnnnnnnnnnnnnnnnnnnnnnnnnnnnnnnnnnnnnnnnnnnnnnnnnnnnnnnnnnnnnnnnnnnnnnnnnnnnnnnnnnnnnnnnnnnnnnnnnnnnnnnnnnnnnnnnnnnnnnnnnnnnnnnnnnnnnnnnnnnnnnnnnnnnnnnnnnnnnnnnnnnnnnnnnnnnnnnnnnnnnnnnnnnnnnnnnnnnnnnnnnnnnnnnnnnnnnnnnnnnnnnnnnnnnnnnnnnnnnnnnnnnnnnnnnnnnnnnnnnnnnnnnnnnnnnnnnnnnnnnnnnnnnnnnnnnnnnnnnnnnnnnnnnnnnnnnnnnnnnnnnnnnnnnnnnnnnnnnnnnnnnnnnnnnnnnnnnnnnnnnnnnnnnnnnnnnnnnnnnnnnnnnnnnnnnnnnnnnnnnnnnnnnnnnnnnnnnnnnnnnnnnnnnnnnnnnnnnnnnnnnnnnnnnnnnnnnnnnnnnnnnnnnnnnnnnnnnnnnnnnnnnnnnnnnnnnnnnnnnnnnnnnnnnnnnnnnnnnnnnnnnnnnnnnnnnnnnnnnnnnnnnnnnnnnnnnnnnnnnnnnnnnnnnnnnnnnnnnnnnnnnnnnnnnnnnnnnnnnnnnnnnnnnnnnnnnnnnnnnnnnnnnnnnnnnnnnnnnnnnnnnnnnnnnnnnnnnnnnnnnnnnnnnnnnnnnnnnnnnnnnnnnnnnnnnnnnnnnnnnnnnnnnnnnnnnnnnnnnnnnnnnnnnnnnnnnnnnnnnnnnnnnnnnnnnnnnnnnnnnnnnnnnnnnnnnnnnnnnnnnnnnnnnnnnnnnnnnnnnnnnnnnnnnnnnnnnnnnnnnnnnnnnnnnnnnnnnnnnnnnnnnnnnnnnnnnnnnnnnnnnnnnnnnnnnnnnnnnnnnnnnnnnnnnnnnnnnnnnnnnnnnnnnnnnnnnnnnnnnnnnnnnnnnnnnnnnnnnnnnnnnnnnnnnnnnnnnnnnnnnnnnnnnnnnnnnnnnnnnnnnnnnnnnnnnnnnnnnnnnnnnnnnnnnnnnnnnnnnnnnnnnnnnnnnnnnnnnnnnnnnnnnnnnnntttgccgccccgctggatcacttggacggtggaatgataacccatgcttggcctccccgccggaagtgcggtcagaggctaatatatcatagctgtatagctaagacaagaaaatttcttaatttttcgattttcttgattttttcacagcttctttttgtcgggatgtatgcgccacagggacgatatattgttggggtgggttctacgacatgaacatctggagccccaagaagcgagacgagaaattgaatcacaggcgcgacaatcccgtcaaacgagtgctggtcaagcacccgggcgactggccgtggtcgcgctgcggcgggaggttctatttctggaatgatggttcgatcttgagcatggacaagaggctatgaaggtgtcgacatgccgaggggcgcatacatcccgacaaaaacccgtcgggacgtatgcgccacccgcgaaatcgatcgcaagattccctccgaatcggaacgccgcggaggcatcaaagcttctgcgcttagtcaacggcgcgccttgcagcctgtgaagtgtgggctaagcggacgcgataaccgttgtcgtggtcttcgggccttgcctttgccgcgtcccgggtgtataccttcgccatgattgtcctgtggtagctacgcagcggacggtccggtccccccggggcgcgacgggcctgccacccgcctcttgcccaggcaaggaggaagccgtggagtacaacctgctcgaagaaaagtggattcccgttctgtggaaagatgggcacagcggtcgcgtgggcattagtgaggcccttaggcaagcaggccggattcgccaaatcgcggccagcaacccaatggaccgcctggccatcctgcgtttcctgcttgcgttgctctattggtgcaaagggaatcccccggacgacaagaactcgatttcttcgtttccctctgattggttcaagaaactcgatgacaacaaagactgtttcaaccttcagggcgatgggaagcggttttaccaacgcaagcctaaccgacttgagaagaagctgtccgtcaactatctgatgcaagaagtgccgaccggcacaaacttctggcacttccggcatgggacagatttcagaaacggcttatgtccggcatgctgcgcaatgggcttgttgcgccttccgctctttgctacgtcggccgggcgcggcaagcccccgggcgtcaatcaaaaaccgccgatctacatcgtgccgatgggcgactgcctttccgaaaccctgcgcctctcatggcggaagacgtcggagatgaacctgggcacgcccacatgggaaaatccggacataagcctccctcaacacggcaatgttccattattgataggattaacgtgggtaccgcggcgcgtctggttagacactccggagacaccagagtccaactgcatcgcctgcgggcgcagggaggctctgatacgtcaatgtgtctttgcgggtattgggagcacaaagacaggcgaaggcagtctggcacgaatctggaacgacccgcacaccatcagcgaaggcgacgagattgtgaagcctttcagcgcgcttggcccggccgacgctgcggctgggaagtggacgaaggtcgtggcgggaatcctgtgcggggaaaagccgaaggggaacagtaagttgtgggtcgtcagctttgcgacagtgcagaacgacaaatacctggaagcagccgagcgggagattcaattcttggccgcgctcgacgacgtgaaggttcaggcgagtttgcaagaaatccaggcgtggcagaaggaaggctggaagctcgttggcagagccaaaccgcgagagacttcacgaaacagaggacaccttgaaattctctccgcagtcgccgctgttcgtccccaagccgaggcaacggtttccggaaaaatcgacgagatgatcgcagaaggcggtaaggcatgggaagaggcggcccaggaatatcgtccgttgatggccgccgtcgccaaatcgctttccccgggctacacaaccgcttccctccggaggcgacaagaaattgccgctgtaaagccggacatgcggccaaagagaaacaacaaagacgaagggggggacaagtgactccaacggagcagtacgtcgaagttctgactcgactgaaacccggtgagctcgggctcttgcgcaaccatgccgggcaagggctcgacgaatcggtagagggctttgaccttttcgcaggcctttggtggccgctgcgggcgcaaacccaacgggcgcctcgccgtgaggtggcctggcttgtcgccaaactctacgccctccggcccctcgagcattcaccccgcgagaccctcgctcgccagctcgggcgatcccggccgggcgagaaaacagcgcggcagcgtttcgagcaacgcttcgacaggatgctcacgctgccgcttgctgaaatcgaacccgccctacagtgggcaatcgacctcatagcttccaagcacctcgaactcgactgggtgcggctgacgaacgatctttccatctgggaacgcgaatccacccggctcaaatgggccgaggaatttttgaactgtccaagaggaggagagtcatgttgatccagattcacgccattcagaatcacagcccggccaacctgaaccgggatgacctgggcgcgcccaagacttgcttttttggcggagtcttgcgctcccgtatttccagccagtgccttaagcgcagcatccgcatgagtgaggagttcagacaattgctgggcggagttcgcacccgccagttggcgaaagagattgcggaaaaggtgacgggcaaagacgtcaggaagcgagcggagaacattctcaaagcctgcgggctggagcctaagaaagcaaaaaaacaggaaggagaagacgaacaggaaagtgctgagaggagcaagatgctggtttacaccacccaagaggcgattacacgcatggccgaactcctccagcagggcgacggaaaaacggacgaggccttggcagcggagttcggcaagctcatcagtgaatccgtcgccgtgccggacatggcgctgagcggcaggatgcttgaaacgggagtcctcaaagacacgacggttgaggcatcgcttcaagtcgcccatgccatttccacccatgaggcccggcccgaggtggactactatgtcgccgccgatgatgtccccggcgaggacgcgggcgcaggttacgtggatgaagccatgttcggttcggcatgtttctacaagtatttctccattcattgggaaacgctggtcaaaaacctgaagcccttcgggacgaatcacgaaaaactggcggcccataccgtcggcgccttcattcgcgccgcggccttggccaaccccacgggaaaacaaaatagttttgccgcgcacaaccctcctgacgggatgttggtggaagtcagaaacactcccatcagctacgccaacgccttcgccaaaccggcggctcctcagggcgaacgggacatcatctcgcagagcgtggcgcagcttgcccattatgtgaacgacatagatacgggatacggcaagccgacgaagcggttctggttctctccaaatctccgctatccgttgacggctaccaccacggagagcgaagacggaaaacagaaacagcgtgaggtcccgcttgccgacaaagatgttaagtctcttgacgaactgatagcggctgtactcaaggaaatcggttacgactggcaggaggccaagaaagtggtcctgaatccggaggtgccccatgagcgcaaagacgctgctacttcggcttgaaggtcctcttcaggcatggggcgatcagcaatccaagttcgtcattcggcgcacggccgaggcgccgaccaagtccggcgtcatcgggatgctttgcgcggcattgggcgtttcccggccagaggcccgcgaaggctggcttccaaggctggcccggctgcgcatgggcgtacgcgtcgatgcgccaggggtccgctggtgggattatcacacggtgggtgcggggatgccgatgcgtaccgccgaggggggaaccaagtccggagccatgctcacccgccgcgaatacctttgcgacgcctcgtttctcgtcgctcttcagggcgaaccggacctcattgaggaactggaggcggcaatcaaagcgcccaagtggacactctacctcggcagaaagtgctgccccccttgccgccctctgctggagcatccgggaggtgaattccccgacttgctttctgccctcgaatcggtcccctggcgtcggcggctgaaggacgatccccagccgcgacccgtcgattgcctgcttgattgggaacccaccaacgagcagcccgaggcgcccgatgatgcgctcgtctggtacgacgtgccgttgacattcgagccgccgtcgcaccaaccccgattcgtcatccgcaggcagttgcgcgtcggagcggacggcgacgtaacacttgcggtgcagccaccgcagagcgacacgccaccgcctccgcgcccaagagcggattacacgaacacagagtacaaaaaccgacgcaaggagcggctcgacgacgactatcacttgtgcgttttttgcaagtctcccgccagcaccgtgcagcacatcacgtaccgccgcgcgggcggcggcgaactccgggacgatttgcgctccctctgccgcctctgccacgacgccgtgaccatgatcgagtacgggctcggaatgggcttggaccgcatcaaccccgaagagccccgttggcgcgacaagatcatcgagaagcgggaagagattatcaggttccgctctctggagactcgccgcagacgccttgccgctgaggaggtggaatagccatgtacctctcctgcctcttgattgacgtcggcaccaaccccgaccgccccaggcccgggcggctctggctgcgaaacctccatcacgtccaccagcgcctttgcatggcgtttccatccaaagaccgaatatcccacgatccccacttcctcaagcctttcaaacccgcggactttgccaacaaccaggtccatgtaagacgtgacggcgactccggctttctcttccgcatcgacccgcaaccgggcgggcgggtcgtgatcctcgtccagtctaactctgccgtaaagcctgactggggctacgccttccacaacgcccgttttcttctgaatcctctagccgctccccctcaggtgcaggaattcgacccccgctttgagaagggtcagcggcttcgcttccgtatccgcgccaatctgagtaagaagataaaaaccagcacagagggcgttgatcttacgaggacgcgagaggggacagataagcggggccgcccgaaggcccaaggcaaacgcgtggcgctgacctgggacaaggaccagaaccgcgacgatgtgatacgaaaatggttcgccggcaagggcggccaaggtggattccaagtggaaactttccgggtcttgcagatcgggtggggcgcaggagaccgatccgacccgaggccgacgggcggccgcatgaaatttcgctcggcgttattggaggggacgcttacggttgaggacgcggacagcttcagagaaaccatcgtgggcggcgttgggcacggcaaagccttcggcttcggcctgctttccgtggcgccgctctcgctgtagcggcggtctccgaccgccggtacgtcgatcggagatcgacgctacaatcccttgtcgatcggggatccgtgcaacatttcttgagcggagatcgagccaatatgaaattcaaaccccgcttgcggcgactggactggctctatacgggcagcccaatctactatctcacgctgtgtacgcaggaccgcaaacgctcgttggcaaatcctgcgattcaccgggaattcacgagattctccgaacgggcgagcgattttcttgtttgggtcgggttcttcatgatcatgcctgatcacatccatcttttcgccggcttttgtcgtgagtccccacctttagggaaatggatcaaggcgctgcgcggggatttatccaaagtcctccgggaagatgagggcgagggcacacattgggagaaagactttttcgatcacgtcctgagatcgcaagaatcctatcgggagaaatatgaatatgtccggcagaatccggtccgggccggtttagtcaagcgcccggaagattggccgtaccagggtgagatccatcgcctggttttgtagcggcggtctccgaccgccgtaacgtcgatcggagatcgactacaaccccggtcgatcggagatcgacgctacaaccgccgtcgatcggagatcgacgctacagcacgggctggaggctctgtgagaattcaagatctccacgttctacccaagttcagtgacgggtggagttatctgtacgtcgagcattgccacgtcgatcaggaagagcgggccattgccgtccacgatcaagccgggaaggtgccggtcccctgtgccaatctggctctcctgatgttgggtccgggcgtctcgattactcacgccgccatctccgtgttggcggaccatgggtgcctggtggcttggtgcggggaggagggagtccgcttctacgccgtgggcatgggcgagacgcgcaacgcggccaacttcctgcatcaggcgaggctgtgggcggaccagggtttccatatgcaggtggtgcgccgcctctatcagttgcgattttcggagaagttcgaccctgccctgaccctccagcaaatccgcggcatggagggcgtgcgggtgcgcgatgcctacgccaaggccgcccaggaagccggcatcacgtggtcgggccgcagctataaacgcgatgagtggagcaaggcggaccctgccaaccgagccttgtccgccgctaactcctgcctatatggaatctgccatgctgccatcgtgtcagcaggtttttcgcccgcactcgggtttatccacaccggcaagatgctgtccttcgtctacgatctcgccgacctgtacaaggctgaaattaccgttccagtggcatttcgcgccgccgccgaggggacgggacagttggaacgccgggtgcgcatcacctgccgcgatcagttcgtatccacgcggcttctggagagaatcatcccggatgtccaaagggcgttgatgctggcaaaagcgacggcctgggacactaccttcgacctggatgccgccgcccccggcttcctctgggacaatctggaaggagaggtcgaaggcggccgcctgctagcccccgaaatcggtgaaacggagcccggcgatggtggtcctgattcttgagcgcgtccccccagggttgcgaggcgagctgactcgctggtttttggaacctcaggcgggagtgttcgtgggacgcgtctccgccatggtccgtgatcggctctgggaaaaagcctgcagccaggccaagggaggcgggtgcttgattatctattcaagcgacaatgaacagggctttcgagtccgaacctggggccaaacagctcgggtcatcgatgacttcgagggcctttttctcgttcgcatgccgcagaatcaataatttagtaagtgttgtccccacgcgcgtgggggtgaaccgccggggctgaaggtttcatgggctggaaagaagttgtccccacgcgcgtgggggtgaaccgatatgctgcatgtgccggggctggcgcttgatgttgtccccacgcgcgtgggggtgaaccggtatcggcgagtggcaaggcgaatccacttaggttgtccccacgcgcgtgggggtgaaccgacctccgagggcgcggggcgcgtgctggcgatgttgtccccacgcgcgtgggggtgaaccggctggggccgacgcgcgcttgtgagactgcgggttgtccccacgcgcgtgggggtgaaccgcgggagaactttgaaggcacggtcctcgatcacgttgtccccacgcgcgtgggggtgaaccggcgcaggttaaggctgaggccaaggccgatgcgttgtccccacgcgcgtgggggtgaaccgtaatggtggcttgcaccttctgctcgaccgatgttgtccccacgcgcgtgggggtgaaccgcagcgggccgtgttggaggagaaggtcgcggagttgtccccacgcgcgtgggggtgaaccgttcccagccgcaggcaggatcaccgtaccccagttgtccccacgcgcgtgggggtgaaccgcaaaacaatatcaagaccaagcacttggatgtgttgtccccacgcgcgtgggggtgaaccgcatcgggcagcacagcggccttataccccaaagttgtccccacgcgcgtgggggtgaaccggcagctcgcggcgattcgcattgccgctgaaagttgtccccacgcgcgtgggggtgaaccggggagtcgtgagtgtagttacaggcagggttcgttgtccccacgcgcgtgggggtgaaccgcttctgcatcttataaagaacgccagtttgaagttgtccccacgcgcgtgggggtgaaccggtacggttcccaggggaattatttcttggggtgttgtccccacgcgcgtgggggtgaaccgatgtagcttgatatgggtgtggtgtcgcagaagttgtccccacgcgcgtgggggtgaaccggcggcgcgcacattccaacctcgtccgtatccgttgtccccacgcgcgtgggggtgaaccggcggacacggcggatgtgacgaatatggagtcgttgtccccacgcgcgtgggggtgaaccggtctctcgaaaaggaaagccaactttcagcttgttgtccccacgcgcgtgggggtgaaccgctcttggcatagagcttagtgagtttgatgaagttgtccccacgcgcgtgggggtgaaccgcctttgccctccgagacgcaacagctccattcgttgtccccacgcgcgtgggggtgaaccggcgagcgcaggtctaagcgaccgcgacaaagagttgtccccacgcgcgtgggggtgaaccggtgatggacacttcctaaaatggcattaagtcgttgtccccacgcgcgtgggggtgaaccgcagcgggtagcgcagacttcgtgcatatcgaagtctgcggcttttgccgccgtgaatcttgaaaagccgcagacctgcaaaaagcgcaggtctgcgctacccactgcctggccatcctggagaattgaaagtccctccagtaaagcggcgaagcgcaggatttccggctgcttcaatcgcttgcgacgctcaccggtcagtagcgcgttggtaatttcgagcccccatacggctggaacaacgagcgtctgcccttcagtgccaccaggaccccgtccgcgtattcgctcgcttcatccggggagcaccaggcaagcgccaccgacgcatgcaccacaacgccgctcaaaatcgccgtccctcaattatcatttcgcggacgctcatggtgtggggctttacgcgcttgcgcaacgcgcgcatgccctcgacaatctcctcgtgcgtcagctttcgatccgagtctcgaaccggcaccagcattgccgccggaacgccgtgtcttgtaatcgtgatcctttcgcaacccatcttgtccagctaaagctccgcatcagctatagtctccctctggccgtgcggcccgccccttgcggcgcaaccaaaccgaagctcaaaacgcgacatcgtcctcgtagcgcgaccggacactgaaggtaaaggttcgccacccgtctcccctgcaaaaccgggtcgcggagtactattgctttgcacagcgggggacgaccgaggcgctacggaagaggttggttcgcgaaactgagcaagagacccctcacccgtcccgctccggctggtggaagcgccggagcgggacacgctcagccccaagggagagggctatggattcagttctacgcgcggtgtccagtcaaagatgtgggacacgctcagccccaagggagagggctatggattcagttctacgcgcggtgtccagtcaaagatgtgggacacgctcagccccaagggagagggctatggattcagttctacgcgcggtgtcca

SEQ ID NO: 1035 - DNA, 104017 bp, Artificial Sequence
  Synthetic Oligonucleotide
  misc_feature (1)..(93901): n is a, c, g, or t
nnnnnnnnnnnnnnnnnnnnnnnnnnnnnnnnnnnnnnnnnnnnnnnnnnnnnnnnnnnnnnnnnnnnnnnnnnnnnnnnnnnnnnnnnnnnnnnnnnnnnnnnnnnnnnnnnnnnnnnnnnnnnnnnnnnnnnnnnnnnnnnnnnnnnnnnnnnnnnnnnnnnnnnnnnnnnnnnnnnnnnnnnnnnnnnnnnnnnnnnnnnnnnnnnnnnnnnnnnnnnnnnnnnnnnnnnnnnnnnnnnnnnnnnnnnnnnnnnnnnnnnnnnnnnnnnnnnnnnnnnnnnnnnnnnnnnnnnnnnnnnnnnnnnnnnnnnnnnnnnnnnnnnnnnnnnnnnnnnnnnnnnnnnnnnnnnnnnnnnnnnnnnnnnnnnnnnnnnnnnnnnnnnnnnnnnnnnnnnnnnnnnnnnnnnnnnnnnnnnnnnnnnnnnnnnnnnnnnnnnnnnnnnnnnnnnnnnnnnnnnnnnnnnnnnnnnnnnnnnnnnnnnnnnnnnnnnnnnnnnnnnnnnnnnnnnnnnnnnnnnnnnnnnnnnnnnnnnnnnnnnnnnnnnnnnnnnnnnnnnnnnnnnnnnnnnnnnnnnnnnnnnnnnnnnnnnnnnnnnnnnnnnnnnnnnnnnnnnnnnnnnnnnnnnnnnnnnnnnnnnnnnnnnnnnnnnnnnnnnnnnnnnnnnnnnnnnnnnnnnnnnnnnnnnnnnnnnnnnnnnnnnnnnnnnnnnnnnnnnnnnnnnnnnnnnnnnnnnnnnnnnnnnnnnnnnnnnnnnnnnnnnnnnnnnnnnnnnnnnnnnnnnnnnnnnnnnnnnnnnnnnnnnnnnnnnnnnnnnnnnnnnnnnnnnnnnnnnnnnnnnnnnnnnnnnnnnnnnnnnnnnnnnnnnnnnnnnnnnnnnnnnnnnnnnnnnnnnnnnnnnnnnnnnnnnnnnnnnnnnnnnnnnnnnnnnnnnnnnnnnnnnnnnnnnnnnnnnnnnnnnnnnnnnnnnnnnnnnnnnnnnnnnnnnnnnnnnnnnnnnnnnnnnnnnnnnnnnnnnnnnnnnnnnnnnnnnnnnnnnnnnnnnnnnnnnnnnnnnnnnnnnnnnnnnnnnnnnnnnnnnnnnnnnnnnnnnnnnnnnnnnnnnnnnnnnnnnnnnnnnnnnnnnnnnnnnnnnnnnnnnnnnnnnnnnnnnnnnnnnnnnnnnnnnnnnnnnnnnnnnnnnnnnnnnnnnnnnnnnnnnnnnnnnnnnnnnnnnnnnnnnnnnnnnnnnnnnnnnnnnnnnnnnnnnnnnnnnnnnnnnnnnnnnnnnnnnnnnnnnnnnnnnnnnnnnnnnnnnnnnnnnnnnnnnnnnnnnnnnnnnnnnnnnnnnnnnnnnnnnnnnnnnnnnnnnnnnnnnnnnnnnnnnnnnnnnnnnnnnnnnnnnnnnnnnnnnnnnnnnnnnnnnnnnnnnnnnnnnnnnnnnnnnnnnnnnnnnnnnnnnnnnnnnnnnnnnnnnnnnnnnnnnnnnnnnnnnnnnnnnnnnnnnnnnnnnnnnnnnnnnnnnnnnnnnnnnnnnnnnnnnnnnnnnnnnnnnnnnnnnnnnnnnnnnnnnnnnnnnnnnnnnnnnnnnnnnnnnnnnnnnnnnnnnnnnnnnnnnnnnnnnnnnnnnnnnnnnnnnnnnnnnnnnnnnnnnnnnnnnnnnnnnnnnnnnnnnnnnnnnnnnnnnnnnnnnnnnnnnnnnnnnnnnnnnnnnnnnnnnnnnnnnnnnnnnnnnnnnnnnnnnnnnnnnnnnnnnnnnnnnnnnnnnnnnnnnnnnnnnnnnnnnnnnnnnnnnnnnnnnnnnnnnnnnnnnnnnnnnnnnnnnnnnnnnnnnnnnnnnnnnnnnnnnnnnnnnnnnnnnnnnnnnnnnnnnnnnnnnnnnnnnnnnnnnnnnnnnnnnnnnnnnnnnnnnnnnnnnnnnnnnnnnnnnnnnnnnnnnnnnnnnnnnnnnnnnnnnnnnnnnnnnnnnnnnnnnnnnnnnnnnnnnnnnnnnnnnnnnnnnnnnnnnnnnnnnnnnnnnnnnnnnnnnnnnnnnnnnnnnnnnnnnnnnnnnnnnnnnnnnnnnnnnnnnnnnnnnnnnnnnnnnnnnnnnnnnnnnnnnnnnnnnnnnnnnnnnnnnnnnnnnnnnnnnnnnnnnnnnnnnnnnnnnnnnnnnnnnnnnnnnnnnnnnnnnnnnnnnnnnnnnnnnnnnnnnnnnnnnnnnnnnnnnnnnnnnnnnnnnnnnnnnnnnnnnnnnnnnnnnnnnnnnnnnnnnnnnnnnnnnnnnnnnnnnnnnnnnnnnnnnnnnnnnnnnnnnnnnnnnnnnnnnnnnnnnnnnnnnnnnnnnnnnnnnnnnnnnnnnnnnnnnnnnnnnnnnnnnnnnnnnnnnnnnnnnnnnnnnnnnnnnnnnnnnnnnnnnnnnnnnnnnnnnnnnnnnnnnnnnnnnnnnnnnnnnnnnnnnnnnnnnnnnnnnnnnnnnnnnnnnnnnnnnnnnnnnnnnnnnnnnnnnnnnnnnnnnnnnnnnnnnnnnnnnnnnnnnnnnnnnnnnnnnnnnnnnnnnnnnnnnnnnnnnnnnnnnnnnnnnnnnnnnnnnnnnnnnnnnnnnnnnnnnnnnnnnnnnnnnnnnnnnnnnnnnnnnnnnnnnnnnnnnnnnnnnnnnnnnnnnnnnnnnnnnnnnnnnnnnnnnnnnnnnnnnnnnnnnnnnnnnnnnnnnnnnnnnnnnnnnnnnnnnnnnnnnnnnnnnnnnnnnnnnnnnnnnnnnnnnnnnnnnnnnnnnnnnnnnnnnnnnnnnnnnnnnnnnnnnnnnnnnnnnnnnnnnnnnnnnnnnnnnnnnnnnnnnnnnnnnnnnnnnnnnnnnnnnnnnnnnnnnnnnnnnnnnnnnnnnnnnnnnnnnnnnnnnnnnnnnnnnnnnnnnnnnnnnnnnnnnnnnnnnnnnnnnnnnnnnnnnnnnnnnnnnnnnnnnnnnnnnnnnnnnnnnnnnnnnnnnnnnnnnnnnnnnnnnnnnnnnnnnnnnnnnnnnnnnnnnnnnnnnnnnnnnnnnnnnnnnnnnnnnnnnnnnnnnnnnnnnnnnnnnnnnnnnnnnnnnnnnnnnnnnnnnnnnnnnnnnnnnnnnnnnnnnnnnnnnnnnnnnnnnnnnnnnnnnnnnnnnnnnnnnnnnnnnnnnnnnnnnnnnnnnnnnnnnnnnnnnnnnnnnnnnnnnnnnnnnnnnnnnnnnnnnnnnnnnnnnnnnnnnnnnnnnnnnnnnnnnnnnnnnnnnnnnnnnnnnnnnnnnnnnnnnnnnnnnnnnnnnnnnnnnnnnnnnnnnnnnnnnnnnnnnnnnnnnnnnnnnnnnnnnnnnnnnnnnnnnnnnnnnnnnnnnnnnnnnnnnnnnnnnnnnnnnnnnnnnnnnnnnnnnnnnnnnnnnnnnnnnnnnnnnnnnnnnnnnnnnnnnnnnnnnnnnnnnnnnnnnnnnnnnnnnnnnnnnnnnnnnnnnnnnnnnnnnnnnnnnnnnnnnnnnnnnnnnnnnnnnnnnnnnnnnnnnnnnnnnnnnnnnnnnnnnnnnnnnnnnnnnnnnnnnnnnnnnnnnnnnnnnnnnnnnnnnnnnnnnnnnnnnnnnnnnnnnnnnnnnnnnnnnnnnnnnnnnnnnnnnnnnnnnnnnnnnnnnnnnnnnnnnnnnnnnnnnnnnnnnnnnnnnnnnnnnnnnnnnnnnnnnnnnnnnnnnnnnnnnnnnnnnnnnnnnnnnnnnnnnnnnnnnnnnnnnnnnnnnnnnnnnnnnnnnnnnnnnnnnnnnnnnnnnnnnnnnnnnnnnnnnnnnnnnnnnnnnnnnnnnnnnnnnnnnnnnnnnnnnnnnnnnnnnnnnnnnnnnnnnnnnnnnnnnnnnnnnnnnnnnnnnnnnnnnnnnnnnnnnnnnnnnnnnnnnnnnnnnnnnnnnnnnnnnnnnnnnnnnnnnnnnnnnnnnnnnnnnnnnnnnnnnnnnnnnnnnnnnnnnnnnnnnnnnnnnnnnnnnnnnnnnnnnnnnnnnnnnnnnnnnnnnnnnnnnnnnnnnnnnnnnnnnnnnnnnnnnnnnnnnnnnnnnnnnnnnnnnnnnnnnnnnnnnnnnnnnnnnnnnnnnnnnnnnnnnnnnnnnnnnnnnnnnnnnnnnnnnnnnnnnnnnnnnnnnnnnnnnnnnnnnnnnnnnnnnnnnnnnnnnnnnnnnnnnnnnnnnnnnnnnnnnnnnnnnnnnnnnnnnnnnnnnnnnnnnnnnnnnnnnnnnnnnnnnnnnnnnnnnnnnnnnnnnnnnnnnnnnnnnnnnnnnnnnnnnnnnnnnnnnnnnnnnnnnnnnnnnnnnnnnnnnnnnnnnnnnnnnnnnnnnnnnnnnnnnnnnnnnnnnnnnnnnnnnnnnnnnnnnnnnnnnnnnnnnnnnnnnnnnnnnnnnnnnnnnnnnnnnnnnnnnnnnnnnnnnnnnnnnnnnnnnnnnnnnnnnnnnnnnnnnnnnnnnnnnnnnnnnnnnnnnnnnnnnnnnnnnnnnnnnnnnnnnnnnnnnnnnnnnnnnnnnnnnnnnnnnnnnnnnnnnnnnnnnnnnnnnnnnnnnnnnnnnnnnnnnnnnnnnnnnnnnnnnnnnnnnnnnnnnnnnnnnnnnnnnnnnnnnnnnnnnnnnnnnnnnnnnnnnnnnnnnnnnnnnnnnnnnnnnnnnnnnnnnnnnnnnnnnnnnnnnnnnnnnnnnnnnnnnnnnnnnnnnnnnnnnnnnnnnnnnnnnnnnnnnnnnnnnnnnnnnnnnnnnnnnnnnnnnnnnnnnnnnnnnnnnnnnnnnnnnnnnnnnnnnnnnnnnnnnnnnnnnnnnnnnnnnnnnnnnnnnnnnnnnnnnnnnnnnnnnnnnnnnnnnnnnnnnnnnnnnnnnnnnnnnnnnnnnnnnnnnnnnnnnnnnnnnnnnnnnnnnnnnnnnnnnnnnnnnnnnnnnnnnnnnnnnnnnnnnnnnnnnnnnnnnnnnnnnnnnnnnnnnnnnnnnnnnnnnnnnnnnnnnnnnnnnnnnnnnnnnnnnnnnnnnnnnnnnnnnnnnnnnnnnnnnnnnnnnnnnnnnnnnnnnnnnnnnnnnnnnnnnnnnnnnnnnnnnnnnnnnnnnnnnnnnnnnnnnnnnnnnnnnnnnnnnnnnnnnnnnnnnnnnnnnnnnnnnnnnnnnnnnnnnnnnnnnnnnnnnnnnnnnnnnnnnnnnnnnnnnnnnnnnnnnnnnnnnnnnnnnnnnnnnnnnnnnnnnnnnnnnnnnnnnnnnnnnnnnnnnnnnnnnnnnnnnnnnnnnnnnnnnnnnnnnnnnnnnnnnnnnnnnnnnnnnnnnnnnnnnnnnnnnnnnnnnnnnnnnnnnnnnnnnnnnnnnnnnnnnnnnnnnnnnnnnnnnnnnnnnnnnnnnnnnnnnnnnnnnnnnnnnnnnnnnnnnnnnnnnnnnnnnnnnnnnnnnnnnnnnnnnnnnnnnnnnnnnnnnnnnnnnnnnnnnnnnnnnnnnnnnnnnnnnnnnnnnnnnnnnnnnnnnnnnnnnnnnnnnnnnnnnnnnnnnnnnnnnnnnnnnnnnnnnnnnnnnnnnnnnnnnnnnnnnnnnnnnnnnnnnnnnnnnnnnnnnnnnnnnnnnnnnnnnnnnnnnnnnnnnnnnnnnnnnnnnnnnnnnnnnnnnnnnnnnnnnnnnnnnnnnnnnnnnnnnnnnnnnnnnnnnnnnnnnnnnnnnnnnnnnnnnnnnnnnnnnnnnnnnnnnnnnnnnnnnnnnnnnnnnnnnnnnnnnnnnnnnnnnnnnnnnnnnnnnnnnnnnnnnnnnnnnnnnnnnnnnnnnnnnnnnnnnnnnnnnnnnnnnnnnnnnnnnnnnnnnnnnnnnnnnnnnnnnnnnnnnnnnnnnnnnnnnnnnnnnnnnnnnnnnnnnnnnnnnnnnnnnnnnnnnnnnnnnnnnnnnnnnnnnnnnnnnnnnnnnnnnnnnnnnnnnnnnnnnnnnnnnnnnnnnnnnnnnnnnnnnnnnnnnnnnnnnnnnnnnnnnnnnnnnnnnnnnnnnnnnnnnnnnnnnnnnnnnnnnnnnnnnnnnnnnnnnnnnnnnnnnnnnnnnnnnnnnnnnnnnnnnnnnnnnnnnnnnnnnnnnnnnnnnnnnnnnnnnnnnnnnnnnnnnnnnnnnnnnnnnnnnnnnnnnnnnnnnnnnnnnnnnnnnnnnnnnnnnnnnnnnnnnnnnnnnnnnnnnnnnnnnnnnnnnnnnnnnnnnnnnnnnnnnnnnnnnnnnnnnnnnnnnnnnnnnnnnnnnnnnnnnnnnnnnnnnnnnnnnnnnnnnnnnnnnnnnnnnnnnnnnnnnnnnnnnnnnnnnnnnnnnnnnnnnnnnnnnnnnnnnnnnnnnnnnnnnnnnnnnnnnnnnnnnnnnnnnnnnnnnnnnnnnnnnnnnnnnnnnnnnnnnnnnnnnnnnnnnnnnnnnnnnnnnnnnnnnnnnnnnnnnnnnnnnnnnnnnnnnnnnnnnnnnnnnnnnnnnnnnnnnnnnnnnnnnnnnnnnnnnnnnnnnnnnnnnnnnnnnnnnnnnnnnnnnnnnnnnnnnnnnnnnnnnnnnnnnnnnnnnnnnnnnnnnnnnnnnnnnnnnnnnnnnnnnnnnnnnnnnnnnnnnnnnnnnnnnnnnnnnnnnnnnnnnnnnnnnnnnnnnnnnnnnnnnnnnnnnnnnnnnnnnnnnnnnnnnnnnnnnnnnnnnnnnnnnnnnnnnnnnnnnnnnnnnnnnnnnnnnnnnnnnnnnnnnnnnnnnnnnnnnnnnnnnnnnnnnnnnnnnnnnnnnnnnnnnnnnnnnnnnnnnnnnnnnnnnnnnnnnnnnnnnnnnnnnnnnnnnnnnnnnnnnnnnnnnnnnnnnnnnnnnnnnnnnnnnnnnnnnnnnnnnnnnnnnnnnnnnnnnnnnnnnnnnnnnnnnnnnnnnnnnnnnnnnnnnnnnnnnnnnnnnnnnnnnnnnnnnnnnnnnnnnnnnnnnnnnnnnnnnnnnnnnnnnnnnnnnnnnnnnnnnnnnnnnnnnnnnnnnnnnnnnnnnnnnnnnnnnnnnnnnnnnnnnnnnnnnnnnnnnnnnnnnnnnnnnnnnnnnnnnnnnnnnnnnnnnnnnnnnnnnnnnnnnnnnnnnnnnnnnnnnnnnnnnnnnnnnnnnnnnnnnnnnnnnnnnnnnnnnnnnnnnnnnnnnnnnnnnnnnnnnnnnnnnnnnnnnnnnnnnnnnnnnnnnnnnnnnnnnnnnnnnnnnnnnnnnnnnnnnnnnnnnnnnnnnnnnnnnnnnnnnnnnnnnnnnnnnnnnnnnnnnnnnnnnnnnnnnnnnnnnnnnnnnnnnnnnnnnnnnnnnnnnnnnnnnnnnnnnnnnnnnnnnnnnnnnnnnnnnnnnnnnnnnnnnnnnnnnnnnnnnnnnnnnnnnnnnnnnnnnnnnnnnnnnnnnnnnnnnnnnnnnnnnnnnnnnnnnnnnnnnnnnnnnnnnnnnnnnnnnnnnnnnnnnnnnnnnnnnnnnnnnnnnnnnnnnnnnnnnnnnnnnnnnnnnnnnnnnnnnnnnnnnnnnnnnnnnnnnnnnnnnnnnnnnnnnnnnnnnnnnnnnnnnnnnnnnnnnnnnnnnnnnnnnnnnnnnnnnnnnnnnnnnnnnnnnnnnnnnnnnnnnnnnnnnnnnnnnnnnnnnnnnnnnnnnnnnnnnnnnnnnnnnnnnnnnnnnnnnnnnnnnnnnnnnnnnnnnnnnnnnnnnnnnnnnnnnnnnnnnnnnnnnnnnnnnnnnnnnnnnnnnnnnnnnnnnnnnnnnnnnnnnnnnnnnnnnnnnnnnnnnnnnnnnnnnnnnnnnnnnnnnnnnnnnnnnnnnnnnnnnnnnnnnnnnnnnnnnnnnnnnnnnnnnnnnnnnnnnnnnnnnnnnnnnnnnnnnnnnnnnnnnnnnnnnnnnnnnnnnnnnnnnnnnnnnnnnnnnnnnnnnnnnnnnnnnnnnnnnnnnnnnnnnnnnnnnnnnnnnnnnnnnnnnnnnnnnnnnnnnnnnnnnnnnnnnnnnnnnnnnnnnnnnnnnnnnnnnnnnnnnnnnnnnnnnnnnnnnnnnnnnnnnnnnnnnnnnnnnnnnnnnnnnnnnnnnnnnnnnnnnnnnnnnnnnnnnnnnnnnnnnnnnnnnnnnnnnnnnnnnnnnnnnnnnnnnnnnnnnnnnnnnnnnnnnnnnnnnnnnnnnnnnnnnnnnnnnnnnnnnnnnnnnnnnnnnnnnnnnnnnnnnnnnnnnnnnnnnnnnnnnnnnnnnnnnnnnnnnnnnnnnnnnnnnnnnnnnnnnnnnnnnnnnnnnnnnnnnnnnnnnnnnnnnnnnnnnnnnnnnnnnnnnnnnnnnnnnnnnnnnnnnnnnnnnnnnnnnnnnnnnnnnnnnnnnnnnnnnnnnnnnnnnnnnnnnnnnnnnnnnnnnnnnnnnnnnnnnnnnnnnnnnnnnnnnnnnnnnnnnnnnnnnnnnnnnnnnnnnnnnnnnnnnnnnnnnnnnnnnnnnnnnnnnnnnnnnnnnnnnnnnnnnnnnnnnnnnnnnnnnnnnnnnnnnnnnnnnnnnnnnnnnnnnnnnnnnnnnnnnnnnnnnnnnnnnnnnnnnnnnnnnnnnnnnnnnnnnnnnnnnnnnnnnnnnnnnnnnnnnnnnnnnnnnnnnnnnnnnnnnnnnnnnnnnnnnnnnnnnnnnnnnnnnnnnnnnnnnnnnnnnnnnnnnnnnnnnnnnnnnnnnnnnnnnnnnnnnnnnnnnnnnnnnnnnnnnnnnnnnnnnnnnnnnnnnnnnnnnnnnnnnnnnnnnnnnnnnnnnnnnnnnnnnnnnnnnnnnnnnnnnnnnnnnnnnnnnnnnnnnnnnnnnnnnnnnnnnnnnnnnnnnnnnnnnnnnnnnnnnnnnnnnnnnnnnnnnnnnnnnnnnnnnnnnnnnnnnnnnnnnnnnnnnnnnnnnnnnnnnnnnnnnnnnnnnnnnnnnnnnnnnnnnnnnnnnnnnnnnnnnnnnnnnnnnnnnnnnnnnnnnnnnnnnnnnnnnnnnnnnnnnnnnnnnnnnnnnnnnnnnnnnnnnnnnnnnnnnnnnnnnnnnnnnnnnnnnnnnnnnnnnnnnnnnnnnnnnnnnnnnnnnnnnnnnnnnnnnnnnnnnnnnnnnnnnnnnnnnnnnnnnnnnnnnnnnnnnnnnnnnnnnnnnnnnnnnnnnnnnnnnnnnnnnnnnnnnnnnnnnnnnnnnnnnnnnnnnnnnnnnnnnnnnnnnnnnnnnnnnnnnnnnnnnnnnnnnnnnnnnnnnnnnnnnnnnnnnnnnnnnnnnnnnnnnnnnnnnnnnnnnnnnnnnnnnnnnnnnnnnnnnnnnnnnnnnnnnnnnnnnnnnnnnnnnnnnnnnnnnnnnnnnnnnnnnnnnnnnnnnnnnnnnnnnnnnnnnnnnnnnnnnnnnnnnnnnnnnnnnnnnnnnnnnnnnnnnnnnnnnnnnnnnnnnnnnnnnnnnnnnnnnnnnnnnnnnnnnnnnnnnnnnnnnnnnnnnnnnnnnnnnnnnnnnnnnnnnnnnnnnnnnnnnnnnnnnnnnnnnnnnnnnnnnnnnnnnnnnnnnnnnnnnnnnnnnnnnnnnnnnnnnnnnnnnnnnnnnnnnnnnnnnnnnnnnnnnnnnnnnnnnnnnnnnnnnnnnnnnnnnnnnnnnnnnnnnnnnnnnnnnnnnnnnnnnnnnnnnnnnnnnnnnnnnnnnnnnnnnnnnnnnnnnnnnnnnnnnnnnnnnnnnnnnnnnnnnnnnnnnnnnnnnnnnnnnnnnnnnnnnnnnnnnnnnnnnnnnnnnnnnnnnnnnnnnnnnnnnnnnnnnnnnnnnnnnnnnnnnnnnnnnnnnnnnnnnnnnnnnnnnnnnnnnnnnnnnnnnnnnnnnnnnnnnnnnnnnnnnnnnnnnnnnnnnnnnnnnnnnnnnnnnnnnnnnnnnnnnnnnnnnnnnnnnnnnnnnnnnnnnnnnnnnnnnnnnnnnnnnnnnnnnnnnnnnnnnnnnnnnnnnnnnnnnnnnnnnnnnnnnnnnnnnnnnnnnnnnnnnnnnnnnnnnnnnnnnnnnnnnnnnnnnnnnnnnnnnnnnnnnnnnnnnnnnnnnnnnnnnnnnnnnnnnnnnnnnnnnnnnnnnnnnnnnnnnnnnnnnnnnnnnnnnnnnnnnnnnnnnnnnnnnnnnnnnnnnnnnnnnnnnnnnnnnnnnnnnnnnnnnnnnnnnnnnnnnnnnnnnnnnnnnnnnnnnnnnnnnnnnnnnnnnnnnnnnnnnnnnnnnnnnnnnnnnnnnnnnnnnnnnnnnnnnnnnnnnnnnnnnnnnnnnnnnnnnnnnnnnnnnnnnnnnnnnnnnnnnnnnnnnnnnnnnnnnnnnnnnnnnnnnnnnnnnnnnnnnnnnnnnnnnnnnnnnnnnnnnnnnnnnnnnnnnnnnnnnnnnnnnnnnnnnnnnnnnnnnnnnnnnnnnnnnnnnnnnnnnnnnnnnnnnnnnnnnnnnnnnnnnnnnnnnnnnnnnnnnnnnnnnnnnnnnnnnnnnnnnnnnnnnnnnnnnnnnnnnnnnnnnnnnnnnnnnnnnnnnnnnnnnnnnnnnnnnnnnnnnnnnnnnnnnnnnnnnnnnnnnnnnnnnnnnnnnnnnnnnnnnnnnnnnnnnnnnnnnnnnnnnnnnnnnnnnnnnnnnnnnnnnnnnnnnnnnnnnnnnnnnnnnnnnnnnnnnnnnnnnnnnnnnnnnnnnnnnnnnnnnnnnnnnnnnnnnnnnnnnnnnnnnnnnnnnnnnnnnnnnnnnnnnnnnnnnnnnnnnnnnnnnnnnnnnnnnnnnnnnnnnnnnnnnnnnnnnnnnnnnnnnnnnnnnnnnnnnnnnnnnnnnnnnnnnnnnnnnnnnnnnnnnnnnnnnnnnnnnnnnnnnnnnnnnnnnnnnnnnnnnnnnnnnnnnnnnnnnnnnnnnnnnnnnnnnnnnnnnnnnnnnnnnnnnnnnnnnnnnnnnnnnnnnnnnnnnnnnnnnnnnnnnnnnnnnnnnnnnnnnnnnnnnnnnnnnnnnnnnnnnnnnnnnnnnnnnnnnnnnnnnnnnnnnnnnnnnnnnnnnnnnnnnnnnnnnnnnnnnnnnnnnnnnnnnnnnnnnnnnnnnnnnnnnnnnnnnnnnnnnnnnnnnnnnnnnnnnnnnnnnnnnnnnnnnnnnnnnnnnnnnnnnnnnnnnnnnnnnnnnnnnnnnnnnnnnnnnnnnnnnnnnnnnnnnnnnnnnnnnnnnnnnnnnnnnnnnnnnnnnnnnnnnnnnnnnnnnnnnnnnnnnnnnnnnnnnnnnnnnnnnnnnnnnnnnnnnnnnnnnnnnnnnnnnnnnnnnnnnnnnnnnnnnnnnnnnnnnnnnnnnnnnnnnnnnnnnnnnnnnnnnnnnnnnnnnnnnnnnnnnnnnnnnnnnnnnnnnnnnnnnnnnnnnnnnnnnnnnnnnnnnnnnnnnnnnnnnnnnnnnnnnnnnnnnnnnnnnnnnnnnnnnnnnnnnnnnnnnnnnnnnnnnnnnnnnnnnnnnnnnnnnnnnnnnnnnnnnnnnnnnnnnnnnnnnnnnnnnnnnnnnnnnnnnnnnnnnnnnnnnnnnnnnnnnnnnnnnnnnnnnnnnnnnnnnnnnnnnnnnnnnnnnnnnnnnnnnnnnnnnnnnnnnnnnnnnnnnnnnnnnnnnnnnnnnnnnnnnnnnnnnnnnnnnnnnnnnnnnnnnnnnnnnnnnnnnnnnnnnnnnnnnnnnnnnnnnnnnnnnnnnnnnnnnnnnnnnnnnnnnnnnnnnnnnnnnnnnnnnnnnnnnnnnnnnnnnnnnnnnnnnnnnnnnnnnnnnnnnnnnnnnnnnnnnnnnnnnnnnnnnnnnnnnnnnnnnnnnnnnnnnnnnnnnnnnnnnnnnnnnnnnnnnnnnnnnnnnnnnnnnnnnnnnnnnnnnnnnnnnnnnnnnnnnnnnnnnnnnnnnnnnnnnnnnnnnnnnnnnnnnnnnnnnnnnnnnnnnnnnnnnnnnnnnnnnnnnnnnnnnnnnnnnnnnnnnnnnnnnnnnnnnnnnnnnnnnnnnnnnnnnnnnnnnnnnnnnnnnnnnnnnnnnnnnnnnnnnnnnnnnnnnnnnnnnnnnnnnnnnnnnnnnnnnnnnnnnnnnnnnnnnnnnnnnnnnnnnnnnnnnnnnnnnnnnnnnnnnnnnnnnnnnnnnnnnnnnnnnnnnnnnnnnnnnnnnnnnnnnnnnnnnnnnnnnnnnnnnnnnnnnnnnnnnnnnnnnnnnnnnnnnnnnnnnnnnnnnnnnnnnnnnnnnnnnnnnnnnnnnnnnnnnnnnnnnnnnnnnnnnnnnnnnnnnnnnnnnnnnnnnnnnnnnnnnnnnnnnnnnnnnnnnnnnnnnnnnnnnnnnnnnnnnnnnnnnnnnnnnnnnnnnnnnnnnnnnnnnnnnnnnnnnnnnnnnnnnnnnnnnnnnnnnnnnnnnnnnnnnnnnnnnnnnnnnnnnnnnnnnnnnnnnnnnnnnnnnnnnnnnnnnnnnnnnnnnnnnnnnnnnnnnnnnnnnnnnnnnnnnnnnnnnnnnnnnnnnnnnnnnnnnnnnnnnnnnnnnnnnnnnnnnnnnnnnnnnnnnnnnnnnnnnnnnnnnnnnnnnnnnnnnnnnnnnnnnnnnnnnnnnnnnnnnnnnnnnnnnnnnnnnnnnnnnnnnnnnnnnnnnnnnnnnnnnnnnnnnnnnnnnnnnnnnnnnnnnnnnnnnnnnnnnnnnnnnnnnnnnnnnnnnnnnnnnnnnnnnnnnnnnnnnnnnnnnnnnnnnnnnnnnnnnnnnnnnnnnnnnnnnnnnnnnnnnnnnnnnnnnnnnnnnnnnnnnnnnnnnnnnnnnnnnnnnnnnnnnnnnnnnnnnnnnnnnnnnnnnnnnnnnnnnnnnnnnnnnnnnnnnnnnnnnnnnnnnnnnnnnnnnnnnnnnnnnnnnnnnnnnnnnnnnnnnnnnnnnnnnnnnnnnnnnnnnnnnnnnnnnnnnnnnnnnnnnnnnnnnnnnnnnnnnnnnnnnnnnnnnnnnnnnnnnnnnnnnnnnnnnnnnnnnnnnnnnnnnnnnnnnnnnnnnnnnnnnnnnnnnnnnnnnnnnnnnnnnnnnnnnnnnnnnnnnnnnnnnnnnnnnnnnnnnnnnnnnnnnnnnnnnnnnnnnnnnnnnnnnnnnnnnnnnnnnnnnnnnnnnnnnnnnnnnnnnnnnnnnnnnnnnnnnnnnnnnnnnnnnnnnnnnnnnnnnnnnnnnnnnnnnnnnnnnnnnnnnnnnnnnnnnnnnnnnnnnnnnnnnnnnnnnnnnnnnnnnnnnnnnnnnnnnnnnnnnnnnnnnnnnnnnnnnnnnnnnnnnnnnnnnnnnnnnnnnnnnnnnnnnnnnnnnnnnnnnnnnnnnnnnnnnnnnnnnnnnnnnnnnnnnnnnnnnnnnnnnnnnnnnnnnnnnnnnnnnnnnnnnnnnnnnnnnnnnnnnnnnnnnnnnnnnnnnnnnnnnnnnnnnnnnnnnnnnnnnnnnnnnnnnnnnnnnnnnnnnnnnnnnnnnnnnnnnnnnnnnnnnnnnnnnnnnnnnnnnnnnnnnnnnnnnnnnnnnnnnnnnnnnnnnnnnnnnnnnnnnnnnnnnnnnnnnnnnnnnnnnnnnnnnnnnnnnnnnnnnnnnnnnnnnnnnnnnnnnnnnnnnnnnnnnnnnnnnnnnnnnnnnnnnnnnnnnnnnnnnnnnnnnnnnnnnnnnnnnnnnnnnnnnnnnnnnnnnnnnnnnnnnnnnnnnnnnnnnnnnnnnnnnnnnnnnnnnnnnnnnnnnnnnnnnnnnnnnnnnnnnnnnnnnnnnnnnnnnnnnnnnnnnnnnnnnnnnnnnnnnnnnnnnnnnnnnnnnnnnnnnnnnnnnnnnnnnnnnnnnnnnnnnnnnnnnnnnnnnnnnnnnnnnnnnnnnnnnnnnnnnnnnnnnnnnnnnnnnnnnnnnnnnnnnnnnnnnnnnnnnnnnnnnnnnnnnnnnnnnnnnnnnnnnnnnnnnnnnnnnnnnnnnnnnnnnnnnnnnnnnnnnnnnnnnnnnnnnnnnnnnnnnnnnnnnnnnnnnnnnnnnnnnnnnnnnnnnnnnnnnnnnnnnnnnnnnnnnnnnnnnnnnnnnnnnnnnnnnnnnnnnnnnnnnnnnnnnnnnnnnnnnnnnnnnnnnnnnnnnnnnnnnnnnnnnnnnnnnnnnnnnnnnnnnnnnnnnnnnnnnnnnnnnnnnnnnnnnnnnnnnnnnnnnnnnnnnnnnnnnnnnnnnnnnnnnnnnnnnnnnnnnnnnnnnnnnnnnnnnnnnnnnnnnnnnnnnnnnnnnnnnnnnnnnnnnnnnnnnnnnnnnnnnnnnnnnnnnnnnnnnnnnnnnnnnnnnnnnnnnnnnnnnnnnnnnnnnnnnnnnnnnnnnnnnnnnnnnnnnnnnnnnnnnnnnnnnnnnnnnnnnnnnnnnnnnnnnnnnnnnnnnnnnnnnnnnnnnnnnnnnnnnnnnnnnnnnnnnnnnnnnnnnnnnnnnnnnnnnnnnnnnnnnnnnnnnnnnnnnnnnnnnnnnnnnnnnnnnnnnnnnnnnnnnnnnnnnnnnnnnnnnnnnnnnnnnnnnnnnnnnnnnnnnnnnnnnnnnnnnnnnnnnnnnnnnnnnnnnnnnnnnnnnnnnnnnnnnnnnnnnnnnnnnnnnnnnnnnnnnnnnnnnnnnnnnnnnnnnnnnnnnnnnnnnnnnnnnnnnnnnnnnnnnnnnnnnnnnnnnnnnnnnnnnnnnnnnnnnnnnnnnnnnnnnnnnnnnnnnnnnnnnnnnnnnnnnnnnnnnnnnnnnnnnnnnnnnnnnnnnnnnnnnnnnnnnnnnnnnnnnnnnnnnnnnnnnnnnnnnnnnnnnnnnnnnnnnnnnnnnnnnnnnnnnnnnnnnnnnnnnnnnnnnnnnnnnnnnnnnnnnnnnnnnnnnnnnnnnnnnnnnnnnnnnnnnnnnnnnnnnnnnnnnnnnnnnnnnnnnnnnnnnnnnnnnnnnnnnnnnnnnnnnnnnnnnnnnnnnnnnnnnnnnnnnnnnnnnnnnnnnnnnnnnnnnnnnnnnnnnnnnnnnnnnnnnnnnnnnnnnnnnnnnnnnnnnnnnnnnnnnnnnnnnnnnnnnnnnnnnnnnnnnnnnnnnnnnnnnnnnnnnnnnnnnnnnnnnnnnnnnnnnnnnnnnnnnnnnnnnnnnnnnnnnnnnnnnnnnnnnnnnnnnnnnnnnnnnnnnnnnnnnnnnnnnnnnnnnnnnnnnnnnnnnnnnnnnnnnnnnnnnnnnnnnnnnnnnnnnnnnnnnnnnnnnnnnnnnnnnnnnnnnnnnnnnnnnnnnnnnnnnnnnnnnnnnnnnnnnnnnnnnnnnnnnnnnnnnnnnnnnnnnnnnnnnnnnnnnnnnnnnnnnnnnnnnnnnnnnnnnnnnnnnnnnnnnnnnnnnnnnnnnnnnnnnnnnnnnnnnnnnnnnnnnnnnnnnnnnnnnnnnnnnnnnnnnnnnnnnnnnnnnnnnnnnnnnnnnnnnnnnnnnnnnnnnnnnnnnnnnnnnnnnnnnnnnnnnnnnnnnnnnnnnnnnnnnnnnnnnnnnnnnnnnnnnnnnnnnnnnnnnnnnnnnnnnnnnnnnnnnnnnnnnnnnnnnnnnnnnnnnnnnnnnnnnnnnnnnnnnnnnnnnnnnnnnnnnnnnnnnnnnnnnnnnnnnnnnnnnnnnnnnnnnnnnnnnnnnnnnnnnnnnnnnnnnnnnnnnnnnnnnnnnnnnnnnnnnnnnnnnnnnnnnnnnnnnnnnnnnnnnnnnnnnnnnnnnnnnnnnnnnnnnnnnnnnnnnnnnnnnnnnnnnnnnnnnnnnnnnnnnnnnnnnnnnnnnnnnnnnnnnnnnnnnnnnnnnnnnnnnnnnnnnnnnnnnnnnnnnnnnnnnnnnnnnnnnnnnnnnnnnnnnnnnnnnnnnnnnnnnnnnnnnnnnnnnnnnnnnnnnnnnnnnnnnnnnnnnnnnnnnnnnnnnnnnnnnnnnnnnnnnnnnnnnnnnnnnnnnnnnnnnnnnnnnnnnnnnnnnnnnnnnnnnnnnnnnnnnnnnnnnnnnnnnnnnnnnnnnnnnnnnnnnnnnnnnnnnnnnnnnnnnnnnnnnnnnnnnnnnnnnnnnnnnnnnnnnnnnnnnnnnnnnnnnnnnnnnnnnnnnnnnnnnnnnnnnnnnnnnnnnnnnnnnnnnnnnnnnnnnnnnnnnnnnnnnnnnnnnnnnnnnnnnnnnnnnnnnnnnnnnnnnnnnnnnnnnnnnnnnnnnnnnnnnnnnnnnnnnnnnnnnnnnnnnnnnnnnnnnnnnnnnnnnnnnnnnnnnnnnnnnnnnnnnnnnnnnnnnnnnnnnnnnnnnnnnnnnnnnnnnnnnnnnnnnnnnnnnnnnnnnnnnnnnnnnnnnnnnnnnnnnnnnnnnnnnnnnnnnnnnnnnnnnnnnnnnnnnnnnnnnnnnnnnnnnnnnnnnnnnnnnnnnnnnnnnnnnnnnnnnnnnnnnnnnnnnnnnnnnnnnnnnnnnnnnnnnnnnnnnnnnnnnnnnnnnnnnnnnnnnnnnnnnnnnnnnnnnnnnnnnnnnnnnnnnnnnnnnnnnnnnnnnnnnnnnnnnnnnnnnnnnnnnnnnnnnnnnnnnnnnnnnnnnnnnnnnnnnnnnnnnnnnnnnnnnnnnnnnnnnnnnnnnnnnnnnnnnnnnnnnnnnnnnnnnnnnnnnnnnnnnnnnnnnnnnnnnnnnnnnnnnnnnnnnnnnnnnnnnnnnnnnnnnnnnnnnnnnnnnnnnnnnnnnnnnnnnnnnnnnnnnnnnnnnnnnnnnnnnnnnnnnnnnnnnnnnnnnnnnnnnnnnnnnnnnnnnnnnnnnnnnnnnnnnnnnnnnnnnnnnnnnnnnnnnnnnnnnnnnnnnnnnnnnnnnnnnnnnnnnnnnnnnnnnnnnnnnnnnnnnnnnnnnnnnnnnnnnnnnnnnnnnnnnnnnnnnnnnnnnnnnnnnnnnnnnnnnnnnnnnnnnnnnnnnnnnnnnnnnnnnnnnnnnnnnnnnnnnnnnnnnnnnnnnnnnnnnnnnnnnnnnnnnnnnnnnnnnnnnnnnnnnnnnnnnnnnnnnnnnnnnnnnnnnnnnnnnnnnnnnnnnnnnnnnnnnnnnnnnnnnnnnnnnnnnnnnnnnnnnnnnnnnnnnnnnnnnnnnnnnnnnnnnnnnnnnnnnnnnnnnnnnnnnnnnnnnnnnnnnnnnnnnnnnnnnnnnnnnnnnnnnnnnnnnnnnnnnnnnnnnnnnnnnnnnnnnnnnnnnnnnnnnnnnnnnnnnnnnnnnnnnnnnnnnnnnnnnnnnnnnnnnnnnnnnnnnnnnnnnnnnnnnnnnnnnnnnnnnnnnnnnnnnnnnnnnnnnnnnnnnnnnnnnnnnnnnnnnnnnnnnnnnnnnnnnnnnnnnnnnnnnnnnnnnnnnnnnnnnnnnnnnnnnnnnnnnnnnnnnnnnnnnnnnnnnnnnnnnnnnnnnnnnnnnnnnnnnnnnnnnnnnnnnnnnnnnnnnnnnnnnnnnnnnnnnnnnnnnnnnnnnnnnnnnnnnnnnnnnnnnnnnnnnnnnnnnnnnnnnnnnnnnnnnnnnnnnnnnnnnnnnnnnnnnnnnnnnnnnnnnnnnnnnnnnnnnnnnnnnnnnnnnnnnnnnnnnnnnnnnnnnnnnnnnnnnnnnnnnnnnnnnnnnnnnnnnnnnnnnnnnnnnnnnnnnnnnnnnnnnnnnnnnnnnnnnnnnnnnnnnnnnnnnnnnnnnnnnnnnnnnnnnnnnnnnnnnnnnnnnnnnnnnnnnnnnnnnnnnnnnnnnnnnnnnnnnnnnnnnnnnnnnnnnnnnnnnnnnnnnnnnnnnnnnnnnnnnnnnnnnnnnnnnnnnnnnnnnnnnnnnnnnnnnnnnnnnnnnnnnnnnnnnnnnnnnnnnnnnnnnnnnnnnnnnnnnnnnnnnnnnnnnnnnnnnnnnnnnnnnnnnnnnnnnnnnnnnnnnnnnnnnnnnnnnnnnnnnnnnnnnnnnnnnnnnnnnnnnnnnnnnnnnnnnnnnnnnnnnnnnnnnnnnnnnnnnnnnnnnnnnnnnnnnnnnnnnnnnnnnnnnnnnnnnnnnnnnnnnnnnnnnnnnnnnnnnnnnnnnnnnnnnnnnnnnnnnnnnnnnnnnnnnnnnnnnnnnnnnnnnnnnnnnnnnnnnnnnnnnnnnnnnnnnnnnnnnnnnnnnnnnnnnnnnnnnnnnnnnnnnnnnnnnnnnnnnnnnnnnnnnnnnnnnnnnnnnnnnnnnnnnnnnnnnnnnnnnnnnnnnnnnnnnnnnnnnnnnnnnnnnnnnnnnnnnnnnnnnnnnnnnnnnnnnnnnnnnnnnnnnnnnnnnnnnnnnnnnnnnnnnnnnnnnnnnnnnnnnnnnnnnnnnnnnnnnnnnnnnnnnnnnnnnnnnnnnnnnnnnnnnnnnnnnnnnnnnnnnnnnnnnnnnnnnnnnnnnnnnnnnnnnnnnnnnnnnnnnnnnnnnnnnnnnnnnnnnnnnnnnnnnnnnnnnnnnnnnnnnnnnnnnnnnnnnnnnnnnnnnnnnnnnnnnnnnnnnnnnnnnnnnnnnnnnnnnnnnnnnnnnnnnnnnnnnnnnnnnnnnnnnnnnnnnnnnnnnnnnnnnnnnnnnnnnnnnnnnnnnnnnnnnnnnnnnnnnnnnnnnnnnnnnnnnnnnnnnnnnnnnnnnnnnnnnnnnnnnnnnnnnnnnnnnnnnnnnnnnnnnnnnnnnnnnnnnnnnnnnnnnnnnnnnnnnnnnnnnnnnnnnnnnnnnnnnnnnnnnnnnnnnnnnnnnnnnnnnnnnnnnnnnnnnnnnnnnnnnnnnnnnnnnnnnnnnnnnnnnnnnnnnnnnnnnnnnnnnnnnnnnnnnnnnnnnnnnnnnnnnnnnnnnnnnnnnnnnnnnnnnnnnnnnnnnnnnnnnnnnnnnnnnnnnnnnnnnnnnnnnnnnnnnnnnnnnnnnnnnnnnnnnnnnnnnnnnnnnnnnnnnnnnnnnnnnnnnnnnnnnnnnnnnnnnnnnnnnnnnnnnnnnnnnnnnnnnnnnnnnnnnnnnnnnnnnnnnnnnnnnnnnnnnnnnnnnnnnnnnnnnnnnnnnnnnnnnnnnnnnnnnnnnnnnnnnnnnnnnnnnnnnnnnnnnnnnnnnnnnnnnnnnnnnnnnnnnnnnnnnnnnnnnnnnnnnnnnnnnnnnnnnnnnnnnnnnnnnnnnnnnnnnnnnnnnnnnnnnnnnnnnnnnnnnnnnnnnnnnnnnnnnnnnnnnnnnnnnnnnnnnnnnnnnnnnnnnnnnnnnnnnnnnnnnnnnnnnnnnnnnnnnnnnnnnnnnnnnnnnnnnnnnnnnnnnnnnnnnnnnnnnnnnnnnnnnnnnnnnnnnnnnnnnnnnnnnnnnnnnnnnnnnnnnnnnnnnnnnnnnnnnnnnnnnnnnnnnnnnnnnnnnnnnnnnnnnnnnnnnnnnnnnnnnnnnnnnnnnnnnnnnnnnnnnnnnnnnnnnnnnnnnnnnnnnnnnnnnnnnnnnnnnnnnnnnnnnnnnnnnnnnnnnnnnnnnnnnnnnnnnnnnnnnnnnnnnnnnnnnnnnnnnnnnnnnnnnnnnnnnnnnnnnnnnnnnnnnnnnnnnnnnnnnnnnnnnnnnnnnnnnnnnnnnnnnnnnnnnnnnnnnnnnnnnnnnnnnnnnnnnnnnnnnnnnnnnnnnnnnnnnnnnnnnnnnnnnnnnnnnnnnnnnnnnnnnnnnnnnnnnnnnnnnnnnnnnnnnnnnnnnnnnnnnnnnnnnnnnnnnnnnnnnnnnnnnnnnnnnnnnnnnnnnnnnnnnnnnnnnnnnnnnnnnnnnnnnnnnnnnnnnnnnnnnnnnnnnnnnnnnnnnnnnnnnnnnnnnnnnnnnnnnnnnnnnnnnnnnnnnnnnnnnnnnnnnnnnnnnnnnnnnnnnnnnnnnnnnnnnnnnnnnnnnnnnnnnnnnnnnnnnnnnnnnnnnnnnnnnnnnnnnnnnnnnnnnnnnnnnnnnnnnnnnnnnnnnnnnnnnnnnnnnnnnnnnnnnnnnnnnnnnnnnnnnnnnnnnnnnnnnnnnnnnnnnnnnnnnnnnnnnnnnnnnnnnnnnnnnnnnnnnnnnnnnnnnnnnnnnnnnnnnnnnnnnnnnnnnnnnnnnnnnnnnnnnnnnnnnnnnnnnnnnnnnnnnnnnnnnnnnnnnnnnnnnnnnnnnnnnnnnnnnnnnnnnnnnnnnnnnnnnnnnnnnnnnnnnnnnnnnnnnnnnnnnnnnnnnnnnnnnnnnnnnnnnnnnnnnnnnnnnnnnnnnnnnnnnnnnnnnnnnnnnnnnnnnnnnnnnnnnnnnnnnnnnnnnnnnnnnnnnnnnnnnnnnnnnnnnnnnnnnnnnnnnnnnnnnnnnnnnnnnnnnnnnnnnnnnnnnnnnnnnnnnnnnnnnnnnnnnnnnnnnnnnnnnnnnnnnnnnnnnnnnnnnnnnnnnnnnnnnnnnnnnnnnnnnnnnnnnnnnnnnnnnnnnnnnnnnnnnnnnnnnnnnnnnnnnnnnnnnnnnnnnnnnnnnnnnnnnnnnnnnnnnnnnnnnnnnnnnnnnnnnnnnnnnnnnnnnnnnnnnnnnnnnnnnnnnnnnnnnnnnnnnnnnnnnnnnnnnnnnnnnnnnnnnnnnnnnnnnnnnnnnnnnnnnnnnnnnnnnnnnnnnnnnnnnnnnnnnnnnnnnnnnnnnnnnnnnnnnnnnnnnnnnnnnnnnnnnnnnnnnnnnnnnnnnnnnnnnnnnnnnnnnnnnnnnnnnnnnnnnnnnnnnnnnnnnnnnnnnnnnnnnnnnnnnnnnnnnnnnnnnnnnnnnnnnnnnnnnnnnnnnnnnnnnnnnnnnnnnnnnnnnnnnnnnnnnnnnnnnnnnnnnnnnnnnnnnnnnnnnnnnnnnnnnnnnnnnnnnnnnnnnnnnnnnnnnnnnnnnnnnnnnnnnnnnnnnnnnnnnnnnnnnnnnnnnnnnnnnnnnnnnnnnnnnnnnnnnnnnnnnnnnnnnnnnnnnnnnnnnnnnnnnnnnnnnnnnnnnnnnnnnnnnnnnnnnnnnnnnnnnnnnnnnnnnnnnnnnnnnnnnnnnnnnnnnnnnnnnnnnnnnnnnnnnnnnnnnnnnnnnnnnnnnnnnnnnnnnnnnnnnnnnnnnnnnnnnnnnnnnnnnnnnnnnnnnnnnnnnnnnnnnnnnnnnnnnnnnnnnnnnnnnnnnnnnnnnnnnnnnnnnnnnnnnnnnnnnnnnnnnnnnnnnnnnnnnnnnnnnnnnnnnnnnnnnnnnnnnnnnnnnnnnnnnnnnnnnnnnnnnnnnnnnnnnnnnnnnnnnnnnnnnnnnnnnnnnnnnnnnnnnnnnnnnnnnnnnnnnnnnnnnnnnnnnnnnnnnnnnnnnnnnnnnnnnnnnnnnnnnnnnnnnnnnnnnnnnnnnnnnnnnnnnnnnnnnnnnnnnnnnnnnnnnnnnnnnnnnnnnnnnnnnnnnnnnnnnnnnnnnnnnnnnnnnnnnnnnnnnnnnnnnnnnnnnnnnnnnnnnnnnnnnnnnnnnnnnnnnnnnnnnnnnnnnnnnnnnnnnnnnnnnnnnnnnnnnnnnnnnnnnnnnnnnnnnnnnnnnnnnnnnnnnnnnnnnnnnnnnnnnnnnnnnnnnnnnnnnnnnnnnnnnnnnnnnnnnnnnnnnnnnnnnnnnnnnnnnnnnnnnnnnnnnnnnnnnnnnnnnnnnnnnnnnnnnnnnnnnnnnnnnnnnnnnnnnnnnnnnnnnnnnnnnnnnnnnnnnnnnnnnnnnnnnnnnnnnnnnnnnnnnnnnnnnnnnnnnnnnnnnnnnnnnnnnnnnnnnnnnnnnnnnnnnnnnnnnnnnnnnnnnnnnnnnnnnnnnnnnnnnnnnnnnnnnnnnnnnnnnnnnnnnnnnnnnnnnnnnnnnnnnnnnnnnnnnnnnnnnnnnnnnnnnnnnnnnnnnnnnnnnnnnnnnnnnnnnnnnnnnnnnnnnnnnnnnnnnnnnnnnnnnnnnnnnnnnnnnnnnnnnnnnnnnnnnnnnnnnnnnnnnnnnnnnnnnnnnnnnnnnnnnnnnnnnnnnnnnnnnnnnnnnnnnnnnnnnnnnnnnnnnnnnnnnnnnnnnnnnnnnnnnnnnnnnnnnnnnnnnnnnnnnnnnnnnnnnnnnnnnnnnnnnnnnnnnnnnnnnnnnnnnnnnnnnnnnnnnnnnnnnnnnnnnnnnnnnnnnnnnnnnnnnnnnnnnnnnnnnnnnnnnnnnnnnnnnnnnnnnnnnnnnnnnnnnnnnnnnnnnnnnnnnnnnnnnnnnnnnnnnnnnnnnnnnnnnnnnnnnnnnnnnnnnnnnnnnnnnnnnnnnnnnnnnnnnnnnnnnnnnnnnnnnnnnnnnnnnnnnnnnnnnnnnnnnnnnnnnnnnnnnnnnnnnnnnnnnnnnnnnnnnnnnnnnnnnnnnnnnnnnnnnnnnnnnnnnnnnnnnnnnnnnnnnnnnnnnnnnnnnnnnnnnnnnnnnnnnnnnnnnnnnnnnnnnnnnnnnnnnnnnnnnnnnnnnnnnnnnnnnnnnnnnnnnnnnnnnnnnnnnnnnnnnnnnnnnnnnnnnnnnnnnnnnnnnnnnnnnnnnnnnnnnnnnnnnnnnnnnnnnnnnnnnnnnnnnnnnnnnnnnnnnnnnnnnnnnnnnnnnnnnnnnnnnnnnnnnnnnnnnnnnnnnnnnnnnnnnnnnnnnnnnnnnnnnnnnnnnnnnnnnnnnnnnnnnnnnnnnnnnnnnnnnnnnnnnnnnnnnnnnnnnnnnnnnnnnnnnnnnnnnnnnnnnnnnnnnnnnnnnnnnnnnnnnnnnnnnnnnnnnnnnnnnnnnnnnnnnnnnnnnnnnnnnnnnnnnnnnnnnnnnnnnnnnnnnnnnnnnnnnnnnnnnnnnnnnnnnnnnnnnnnnnnnnnnnnnnnnnnnnnnnnnnnnnnnnnnnnnnnnnnnnnnnnnnnnnnnnnnnnnnnnnnnnnnnnnnnnnnnnnnnnnnnnnnnnnnnnnnnnnnnnnnnnnnnnnnnnnnnnnnnnnnnnnnnnnnnnnnnnnnnnnnnnnnnnnnnnnnnnnnnnnnnnnnnnnnnnnnnnnnnnnnnnnnnnnnnnnnnnnnnnnnnnnnnnnnnnnnnnnnnnnnnnnnnnnnnnnnnnnnnnnnnnnnnnnnnnnnnnnnnnnnnnnnnnnnnnnnnnnnnnnnnnnnnnnnnnnnnnnnnnnnnnnnnnnnnnnnnnnnnnnnnnnnnnnnnnnnnnnnnnnnnnnnnnnnnnnnnnnnnnnnnnnnnnnnnnnnnnnnnnnnnnnnnnnnnnnnnnnnnnnnnnnnnnnnnnnnnnnnnnnnnnnnnnnnnnnnnnnnnnnnnnnnnnnnnnnnnnnnnnnnnnnnnnnnnnnnnnnnnnnnnnnnnnnnnnnnnnnnnnnnnnnnnnnnnnnnnnnnnnnnnnnnnnnnnnnnnnnnnnnnnnnnnnnnnnnnnnnnnnnnnnnnnnnnnnnnnnnnnnnnnnnnnnnnnnnnnnnnnnnnnnnnnnnnnnnnnnnnnnnnnnnnnnnnnnnnnnnnnnnnnnnnnnnnnnnnnnnnnnnnnnnnnnnnnnnnnnnnnnnnnnnnnnnnnnnnnnnnnnnnnnnnnnnnnnnnnnnnnnnnnnnnnnnnnnnnnnnnnnnnnnnnnnnnnnnnnnnnnnnnnnnnnnnnnnnnnnnnnnnnnnnnnnnnnnnnnnnnnnnnnnnnnnnnnnnnnnnnnnnnnnnnnnnnnnnnnnnnnnnnnnnnnnnnnnnnnnnnnnnnnnnnnnnnnnnnnnnnnnnnnnnnnnnnnnnnnnnnnnnnnnnnnnnnnnnnnnnnnnnnnnnnnnnnnnnnnnnnnnnnnnnnnnnnnnnnnnnnnnnnnnnnnnnnnnnnnnnnnnnnnnnnnnnnnnnnnnnnnnnnnnnnnnnnnnnnnnnnnnnnnnnnnnnnnnnnnnnnnnnnnnnnnnnnnnnnnnnnnnnnnnnnnnnnnnnnnnnnnnnnnnnnnnnnnnnnnnnnnnnnnnnnnnnnnnnnnnnnnnnnnnnnnnnnnnnnnnnnnnnnnnnnnnnnnnnnnnnnnnnnnnnnnnnnnnnnnnnnnnnnnnnnnnnnnnnnnnnnnnnnnnnnnnnnnnnnnnnnnnnnnnnnnnnnnnnnnnnnnnnnnnnnnnnnnnnnnnnnnnnnnnnnnnnnnnnnnnnnnnnnnnnnnnnnnnnnnnnnnnnnnnnnnnnnnnnnnnnnnnnnnnnnnnnnnnnnnnnnnnnnnnnnnnnnnnnnnnnnnnnnnnnnnnnnnnnnnnnnnnnnnnnnnnnnnnnnnnnnnnnnnnnnnnnnnnnnnnnnnnnnnnnnnnnnnnnnnnnnnnnnnnnnnnnnnnnnnnnnnnnnnnnnnnnnnnnnnnnnnnnnnnnnnnnnnnnnnnnnnnnnnnnnnnnnnnnnnnnnnnnnnnnnnnnnnnnnnnnnnnnnnnnnnnnnnnnnnnnnnnnnnnnnnnnnnnnnnnnnnnnnnnnnnnnnnnnnnnnnnnnnnnnnnnnnnnnnnnnnnnnnnnnnnnnnnnnnnnnnnnnnnnnnnnnnnnnnnnnnnnnnnnnnnnnnnnnnnnnnnnnnnnnnnnnnnnnnnnnnnnnnnnnnnnnnnnnnnnnnnnnnnnnnnnnnnnnnnnnnnnnnnnnnnnnnnnnnnnnnnnnnnnnnnnnnnnnnnnnnnnnnnnnnnnnnnnnnnnnnnnnnnnnnnnnnnnnnnnnnnnnnnnnnnnnnnnnnnnnnnnnnnnnnnnnnnnnnnnnnnnnnnnnnnnnnnnnnnnnnnnnnnnnnnnnnnnnnnnnnnnnnnnnnnnnnnnnnnnnnnnnnnnnnnnnnnnnnnnnnnnnnnnnnnnnnnnnnnnnnnnnnnnnnnnnnnnnnnnnnnnnnnnnnnnnnnnnnnnnnnnnnnnnnnnnnnnnnnnnnnnnnnnnnnnnnnnnnnnnnnnnnnnnnnnnnnnnnnnnnnnnnnnnnnnnnnnnnnnnnnnnnnnnnnnnnnnnnnnnnnnnnnnnnnnnnnnnnnnnnnnnnnnnnnnnnnnnnnnnnnnnnnnnnnnnnnnnnnnnnnnnnnnnnnnnnnnnnnnnnnnnnnnnnnnnnnnnnnnnnnnnnnnnnnnnnnnnnnnnnnnnnnnnnnnnnnnnnnnnnnnnnnnnnnnnnnnnnnnnnnnnnnnnnnnnnnnnnnnnnnnnnnnnnnnnnnnnnnnnnnnnnnnnnnnnnnnnnnnnnnnnnnnnnnnnnnnnnnnnnnnnnnnnnnnnnnnnnnnnnnnnnnnnnnnnnnnnnnnnnnnnnnnnnnnnnnnnnnnnnnnnnnnnnnnnnnnnnnnnnnnnnnnnnnnnnnnnnnnnnnnnnnnnnnnnnnnnnnnnnnnnnnnnnnnnnnnnnnnnnnnnnnnnnnnnnnnnnnnnnnnnnnnnnnnnnnnnnnnnnnnnnnnnnnnnnnnnnnnnnnnnnnnnnnnnnnnnnnnnnnnnnnnnnnnnnnnnnnnnnnnnnnnnnnnnnnnnnnnnnnnnnnnnnnnnnnnnnnnnnnnnnnnnnnnnnnnnnnnnnnnnnnnnnnnnnnnnnnnnnnnnnnnnnnnnnnnnnnnnnnnnnnnnnnnnnnnnnnnnnnnnnnnnnnnnnnnnnnnnnnnnnnnnnnnnnnnnnnnnnnnnnnnnnnnnnnnnnnnnnnnnnnnnnnnnnnnnnnnnnnnnnnnnnnnnnnnnnnnnnnnnnnnnnnnnnnnnnnnnnnnnnnnnnnnnnnnnnnnnnnnnnnnnnnnnnnnnnnnnnnnnnnnnnnnnnnnnnnnnnnnnnnnnnnnnnnnnnnnnnnnnnnnnnnnnnnnnnnnnnnnnnnnnnnnnnnnnnnnnnnnnnnnnnnnnnnnnnnnnnnnnnnnnnnnnnnnnnnnnnnnnnnnnnnnnnnnnnnnnnnnnnnnnnnnnnnnnnnnnnnnnnnnnnnnnnnnnnnnnnnnnnnnnnnnnnnnnnnnnnnnnnnnnnnnnnnnnnnnnnnnnnnnnnnnnnnnnnnnnnnnnnnnnnnnnnnnnnnnnnnnnnnnnnnnnnnnnnnnnnnnnnnnnnnnnnnnnnnnnnnnnnnnnnnnnnnnnnnnnnnnnnnnnnnnnnnnnnnnnnnnnnnnnnnnnnnnnnnnnnnnnnnnnnnnnnnnnnnnnnnnnnnnnnnnnnnnnnnnnnnnnnnnnnnnnnnnnnnnnnnnnnnnnnnnnnnnnnnnnnnnnnnnnnnnnnnnnnnnnnnnnnnnnnnnnnnnnnnnnnnnnnnnnnnnnnnnnnnnnnnnnnnnnnnnnnnnnnnnnnnnnnnnnnnnnnnnnnnnnnnnnnnnnnnnnnnnnnnnnnnnnnnnnnnnnnnnnnnnnnnnnnnnnnnnnnnnnnnnnnnnnnnnnnnnnnnnnnnnnnnnnnnnnnnnnnnnnnnnnnnnnnnnnnnnnnnnnnnnnnnnnnnnnnnnnnnnnnnnnnnnnnnnnnnnnnnnnnnnnnnnnnnnnnnnnnnnnnnnnnnnnnnnnnnnnnnnnnnnnnnnnnnnnnnnnnnnnnnnnnnnnnnnnnnnnnnnnnnnnnnnnnnnnnnnnnnnnnnnnnnnnnnnnnnnnnnnnnnnnnnnnnnnnnnnnnnnnnnnnnnnnnnnnnnnnnnnnnnnnnnnnnnnnnnnnnnnnnnnnnnnnnnnnnnnnnnnnnnnnnnnnnnnnnnnnnnnnnnnnnnnnnnnnnnnnnnnnnnnnnnnnnnnnnnnnnnnnnnnnnnnnnnnnnnnnnnnnnnnnnnnnnnnnnnnnnnnnnnnnnnnnnnnnnnnnnnnnnnnnnnnnnnnnnnnnnnnnnnnnnnnnnnnnnnnnnnnnnnnnnnnnnnnnnnnnnnnnnnnnnnnnnnnnnnnnnnnnnnnnnnnnnnnnnnnnnnnnnnnnnnnnnnnnnnnnnnnnnnnnnnnnnnnnnnnnnnnnnnnnnnnnnnnnnnnnnnnnnnnnnnnnnnnnnnnnnnnnnnnnnnnnnnnnnnnnnnnnnnnnnnnnnnnnnnnnnnnnnnnnnnnnnnnnnnnnnnnnnnnnnnnnnnnnnnnnnnnnnnnnnnnnnnnnnnnnnnnnnnnnnnnnnnnnnnnnnnnnnnnnnnnnnnnnnnnnnnnnnnnnnnnnnnnnnnnnnnnnnnnnnnnnnnnnnnnnnnnnnnnnnnnnnnnnnnnnnnnnnnnnnnnnnnnnnnnnnnnnnnnnnnnnnnnnnnnnnnnnnnnnnnnnnnnnnnnnnnnnnnnnnnnnnnnnnnnnnnnnnnnnnnnnnnnnnnnnnnnnnnnnnnnnnnnnnnnnnnnnnnnnnnnnnnnnnnnnnnnnnnnnnnnnnnnnnnnnnnnnnnnnnnnnnnnnnnnnnnnnnnnnnnnnnnnnnnnnnnnnnnnnnnnnnnnnnnnnnnnnnnnnnnnnnnnnnnnnnnnnnnnnnnnnnnnnnnnnnnnnnnnnnnnnnnnnnnnnnnnnnnnnnnnnnnnnnnnnnnnnnnnnnnnnnnnnnnnnnnnnnnnnnnnnnnnnnnnnnnnnnnnnnnnnnnnnnnnnnnnnnnnnnnnnnnnnnnnnnnnnnnnnnnnnnnnnnnnnnnnnnnnnnnnnnnnnnnnnnnnnnnnnnnnnnnnnnnnnnnnnnnnnnnnnnnnnnnnnnnnnnnnnnnnnnnnnnnnnnnnnnnnnnnnnnnnnnnnnnnnnnnnnnnnnnnnnnnnnnnnnnnnnnnnnnnnnnnnnnnnnnnnnnnnnnnnnnnnnnnnnnnnnnnnnnnnnnnnnnnnnnnnnnnnnnnnnnnnnnnnnnnnnnnnnnnnnnnnnnnnnnnnnnnnnnnnnnnnnnnnnnnnnnnnnnnnnnnnnnnnnnnnnnnnnnnnnnnnnnnnnnnnnnnnnnnnnnnnnnnnnnnnnnnnnnnnnnnnnnnnnnnnnnnnnnnnnnnnnnnnnnnnnnnnnnnnnnnnnnnnnnnnnnnnnnnnnnnnnnnnnnnnnnnnnnnnnnnnnnnnnnnnnnnnnnnnnnnnnnnnnnnnnnnnnnnnnnnnnnnnnnnnnnnnnnnnnnnnnnnnnnnnnnnnnnnnnnnnnnnnnnnnnnnnnnnnnnnnnnnnnnnnnnnnnnnnnnnnnnnnnnnnnnnnnnnnnnnnnnnnnnnnnnnnnnnnnnnnnnnnnnnnnnnnnnnnnnnnnnnnnnnnnnnnnnnnnnnnnnnnnnnnnnnnnnnnnnnnnnnnnnnnnnnnnnnnnnnnnnnnnnnnnnnnnnnnnnnnnnnnnnnnnnnnnnnnnnnnnnnnnnnnnnnnnnnnnnnnnnnnnnnnnnnnnnnnnnnnnnnnnnnnnnnnnnnnnnnnnnnnnnnnnnnnnnnnnnnnnnnnnnnnnnnnnnnnnnnnnnnnnnnnnnnnnnnnnnnnnnnnnnnnnnnnnnnnnnnnnnnnnnnnnnnnnnnnnnnnnnnnnnnnnnnnnnnnnnnnnnnnnnnnnnnnnnnnnnnnnnnnnnnnnnnnnnnnnnnnnnnnnnnnnnnnnnnnnnnnnnnnnnnnnnnnnnnnnnnnnnnnnnnnnnnnnnnnnnnnnnnnnnnnnnnnnnnnnnnnnnnnnnnnnnnnnnnnnnnnnnnnnnnnnnnnnnnnnnnnnnnnnnnnnnnnnnnnnnnnnnnnnnnnnnnnnnnnnnnnnnnnnnnnnnnnnnnnnnnnnnnnnnnnnnnnnnnnnnnnnnnnnnnnnnnnnnnnnnnnnnnnnnnnnnnnnnnnnnnnnnnnnnnnnnnnnnnnnnnnnnnnnnnnnnnnnnnnnnnnnnnnnnnnnnnnnnnnnnnnnnnnnnnnnnnnnnnnnnnnnnnnnnnnnnnnnnnnnnnnnnnnnnnnnnnnnnnnnnnnnnnnnnnnnnnnnnnnnnnnnnnnnnnnnnnnnnnnnnnnnnnnnnnnnnnnnnnnnnnnnnnnnnnnnnnnnnnnnnnnnnnnnnnnnnnnnnnnnnnnnnnnnnnnnnnnnnnnnnnnnnnnnnnnnnnnnnnnnnnnnnnnnnnnnnnnnnnnnnnnnnnnnnnnnnnnnnnnnnnnnnnnnnnnnnnnnnnnnnnnnnnnnnnnnnnnnnnnnnnnnnnnnnnnnnnnnnnnnnnnnnnnnnnnnnnnnnnnnnnnnnnnnnnnnnnnnnnnnnnnnnnnnnnnnnnnnnnnnnnnnnnnnnnnnnnnnnnnnnnnnnnnnnnnnnnnnnnnnnnnnnnnnnnnnnnnnnnnnnnnnnnnnnnnnnnnnnnnnnnnnnnnnnnnnnnnnnnnnnnnnnnnnnnnnnnnnnnnnnnnnnnnnnnnnnnnnnnnnnnnnnnnnnnnnnnnnnnnnnnnnnnnnnnnnnnnnnnnnnnnnnnnnnnnnnnnnnnnnnnnnnnnnnnnnnnnnnnnnnnnnnnnnnnnnnnnnnnnnnnnnnnnnnnnnnnnnnnnnnnnnnnnnnnnnnnnnnnnnnnnnnnnnnnnnnnnnnnnnnnnnnnnnnnnnnnnnnnnnnnnnnnnnnnnnnnnnnnnnnnnnnnnnnnnnnnnnnnnnnnnnnnnnnnnnnnnnnnnnnnnnnnnnnnnnnnnnnnnnnnnnnnnnnnnnnnnnnnnnnnnnnnnnnnnnnnnnnnnnnnnnnnnnnnnnnnnnnnnnnnnnnnnnnnnnnnnnnnnnnnnnnnnnnnnnnnnnnnnnnnnnnnnnnnnnnnnnnnnnnnnnnnnnnnnnnnnnnnnnnnnnnnnnnnnnnnnnnnnnnnnnnnnnnnnnnnnnnnnnnnnnnnnnnnnnnnnnnnnnnnnnnnnnnnnnnnnnnnnnnnnnnnnnnnnnnnnnnnnnnnnnnnnnnnnnnnnnnnnnnnnnnnnnnnnnnnnnnnnnnnnnnnnnnnnnnnnnnnnnnnnnnnnnnnnnnnnnnnnnnnnnnnnnnnnnnnnnnnnnnnnnnnnnnnnnnnnnnnnnnnnnnnnnnnnnnnnnnnnnnnnnnnnnnnnnnnnnnnnnnnnnnnnnnnnnnnnnnnnnnnnnnnnnnnnnnnnnnnnnnnnnnnnnnnnnnnnnnnnnnnnnnnnnnnnnnnnnnnnnnnnnnnnnnnnnnnnnnnnnnnnnnnnnnnnnnnnnnnnnnnnnnnnnnnnnnnnnnnnnnnnnnnnnnnnnnnnnnnnnnnnnnnnnnnnnnnnnnnnnnnnnnnnnnnnnnnnnnnnnnnnnnnnnnnnnnnnnnnnnnnnnnnnnnnnnnnnnnnnnnnnnnnnnnnnnnnnnnnnnnnnnnnnnnnnnnnnnnnnnnnnnnnnnnnnnnnnnnnnnnnnnnnnnnnnnnnnnnnnnnnnnnnnnnnnnnnnnnnnnnnnnnnnnnnnnnnnnnnnnnnnnnnnnnnnnnnnnnnnnnnnnnnnnnnnnnnnnnnnnnnnnnnnnnnnnnnnnnnnnnnnnnnnnnnnnnnnnnnnnnnnnnnnnnnnnnnnnnnnnnnnnnnnnnnnnnnnnnnnnnnnnnnnnnnnnnnnnnnnnnnnnnnnnnnnnnnnnnnnnnnnnnnnnnnnnnnnnnnnnnnnnnnnnnnnnnnnnnnnnnnnnnnnnnnnnnnnnnnnnnnnnnnnnnnnnnnnnnnnnnnnnnnnnnnnnnnnnnnnnnnnnnnnnnnnnnnnnnnnnnnnnnnnnnnnnnnnnnnnnnnnnnnnnnnnnnnnnnnnnnnnnnnnnnnnnnnnnnnnnnnnnnnnnnnnnnnnnnnnnnnnnnnnnnnnnnnnnnnnnnnnnnnnnnnnnnnnnnnnnnnnnnnnnnnnnnnnnnnnnnnnnnnnnnnnnnnnnnnnnnnnnnnnnnnnnnnnnnnnnnnnnnnnnnnnnnnnnnnnnnnnnnnnnnnnnnnnnnnnnnnnnnnnnnnnnnnnnnnnnnnnnnnnnnnnnnnnnnnnnnnnnnnnnnnnnnnnnnnnnnnnnnnnnnnnnnnnnnnnnnnnnnnnnnnnnnnnnnnnnnnnnnnnnnnnnnnnnnnnnnnnnnnnnnnnnnnnnnnnnnnnnnnnnnnnnnnnnnnnnnnnnnnnnnnnnnnnnnnnnnnnnnnnnnnnnnnnnnnnnnnnnnnnnnnnnnnnnnnnnnnnnnnnnnnnnnnnnnnnnnnnnnnnnnnnnnnnnnnnnnnnnnnnnnnnnnnnnnnnnnnnnnnnnnnnnnnnnnnnnnnnnnnnnnnnnnnnnnnnnnnnnnnnnnnnnnnnnnnnnnnnnnnnnnnnnnnnnnnnnnnnnnnnnnnnnnnnnnnnnnnnnnnnnnnnnnnnnnnnnnnnnnnnnnnnnnnnnnnnnnnnnnnnnnnnnnnnnnnnnnnnnnnnnnnnnnnnnnnnnnnnnnnnnnnnnnnnnnnnnnnnnnnnnnnnnnnnnnnnnnnnnnnnnnnnnnnnnnnnnnnnnnnnnnnnnnnnnnnnnnnnnnnnnnnnnnnnnnnnnnnnnnnnnnnnnnnnnnnnnnnnnnnnnnnnnnnnnnnnnnnnnnnnnnnnnnnnnnnnnnnnnnnnnnnnnnnnnnnnnnnnnnnnnnnnnnnnnnnnnnnnnnnnnnnnnnnnnnnnnnnnnnnnnnnnnnnnnnnnnnnnnnnnnnnnnnnnnnnnnnnnnnnnnnnnnnnnnnnnnnnnnnnnnnnnnnnnnnnnnnnnnnnnnnnnnnnnnnnnnnnnnnnnnnnnnnnnnnnnnnnnnnnnnnnnnnnnnnnnnnnnnnnnnnnnnnnnnnnnnnnnnnnnnnnnnnnnnnnnnnnnnnnnnnnnnnnnnnnnnnnnnnnnnnnnnnnnnnnnnnnnnnnnnnnnnnnnnnnnnnnnnnnnnnnnnnnnnnnnnnnnnnnnnnnnnnnnnnnnnnnnnnnnnnnnnnnnnnnnnnnnnnnnnnnnnnnnnnnnnnnnnnnnnnnnnnnnnnnnnnnnnnnnnnnnnnnnnnnnnnnnnnnnnnnnnnnnnnnnnnnnnnnnnnnnnnnnnnnnnnnnnnnnnnnnnnnnnnnnnnnnnnnnnnnnnnnnnnnnnnnnnnnnnnnnnnnnnnnnnnnnnnnnnnnnnnnnnnnnnnnnnnnnnnnnnnnnnnnnnnnnnnnnnnnnnnnnnnnnnnnnnnnnnnnnnnnnnnnnnnnnnnnnnnnnnnnnnnnnnnnnnnnnnnnnnnnnnnnnnnnnnnnnnnnnnnnnnnnnnnnnnnnnnnnnnnnnnnnnnnnnnnnnnnnnnnnnnnnnnnnnnnnnnnnnnnnnnnnnnnnnnnnnnnnnnnnnnnnnnnnnnnnnnnnnnnnnnnnnnnnnnnnnnnnnnnnnnnnnnnnnnnnnnnnnnnnnnnnnnnnnnnnnnnnnnnnnnnnnnnnnnnnnnnnnnnnnnnnnnnnnnnnnnnnnnnnnnnnnnnnnnnnnnnnnnnnnnnnnnnnnnnnnnnnnnnnnnnnnnnnnnnnnnnnnnnnnnnnnnnnnnnnnnnnnnnnnnnnnnnnnnnnnnnnnnnnnnnnnnnnnnnnnnnnnnnnnnnnnnnnnnnnnnnnnnnnnnnnnnnnnnnnnnnnnnnnnnnnnnnnnnnnnnnnnnnnnnnnnnnnnnnnnnnnnnnnnnnnnnnnnnnnnnnnnnnnnnnnnnnnnnnnnnnnnnnnnnnnnnnnnnnnnnnnnnnnnnnnnnnnnnnnnnnnnnnnnnnnnnnnnnnnnnnnnnnnnnnnnnnnnnnnnnnnnnnnnnnnnnnnnnnnnnnnnnnnnnnnnnnnnnnnnnnnnnnnnnnnnnnnnnnnnnnnnnnnnnnnnnnnnnnnnnnnnnnnnnnnnnnnnnnnnnnnnnnnnnnnnnnnnnnnnnnnnnnnnnnnnnnnnnnnnnnnnnnnnnnnnnnnnnnnnnnnnnnnnnnnnnnnnnnnnnnnnnnnnnnnnnnnnnnnnnnnnnnnnnnnnnnnnnnnnnnnnnnnnnnnnnnnnnnnnnnnnnnnnnnnnnnnnnnnnnnnnnnnnnnnnnnnnnnnnnnnnnnnnnnnnnnnnnnnnnnnnnnnnnnnnnnnnnnnnnnnnnnnnnnnnnnnnnnnnnnnnnnnnnnnnnnnnnnnnnnnnnnnnnnnnnnnnnnnnnnnnnnnnnnnnnnnnnnnnnnnnnnnnnnnnnnnnnnnnnnnnnnnnnnnnnnnnnnnnnnnnnnnnnnnnnnnnnnnnnnnnnnnnnnnnnnnnnnnnnnnnnnnnnnnnnnnnnnnnnnnnnnnnnnnnnnnnnnnnnnnnnnnnnnnnnnnnnnnnnnnnnnnnnnnnnnnnnnnnnnnnnnnnnnnnnnnnnnnnnnnnnnnnnnnnnnnnnnnnnnnnnnnnnnnnnnnnnnnnnnnnnnnnnnnnnnnnnnnnnnnnnnnnnnnnnnnnnnnnnnnnnnnnnnnnnnnnnnnnnnnnnnnnnnnnnnnnnnnnnnnnnnnnnnnnnnnnnnnnnnnnnnnnnnnnnnnnnnnnnnnnnnnnnnnnnnnnnnnnnnnnnnnnnnnnnnnnnnnnnnnnnnnnnnnnnnnnnnnnnnnnnnnnnnnnnnnnnnnnnnnnnnnnnnnnnnnnnnnnnnnnnnnnnnnnnnnnnnnnnnnnnnnnnnnnnnnnnnnnnnnnnnnnnnnnnnnnnnnnnnnnnnnnnnnnnnnnnnnnnnnnnnnnnnnnnnnnnnnnnnnnnnnnnnnnnnnnnnnnnnnnnnnnnnnnnnnnnnnnnnnnnnnnnnnnnnnnnnnnnnnnnnnnnnnnnnnnnnnnnnnnnnnnnnnnnnnnnnnnnnnnnnnnnnnnnnnnnnnnnnnnnnnnnnnnnnnnnnnnnnnnnnnnnnnnnnnnnnnnnnnnnnnnnnnnnnnnnnnnnnnnnnnnnnnnnnnnnnnnnnnnnnnnnnnnnnnnnnnnnnnnnnnnnnnnnnnnnnnnnnnnnnnnnnnnnnnnnnnnnnnnnnnnnnnnnnnnnnnnnnnnnnnnnnnnnnnnnnnnnnnnnnnnnnnnnnnnnnnnnnnnnnnnnnnnnnnnnnnnnnnnnnnnnnnnnnnnnnnnnnnnnnnnnnnnnnnnnnnnnnnnnnnnnnnnnnnnnnnnnnnnnnnnnnnnnnnnnnnnnnnnnnnnnnnnnnnnnnnnnnnnnnnnnnnnnnnnnnnnnnnnnnnnnnnnnnnnnnnnnnnnnnnnnnnnnnnnnnnnnnnnnnnnnnnnnnnnnnnnnnnnnnnnnnnnnnnnnnnnnnnnnnnnnnnnnnnnnnnnnnnnnnnnnnnnnnnnnnnnnnnnnnnnnnnnnnnnnnnnnnnnnnnnnnnnnnnnnnnnnnnnnnnnnnnnnnnnnnnnnnnnnnnnnnnnnnnnnnnnnnnnnnnnnnnnnnnnnnnnnnnnnnnnnnnnnnnnnnnnnnnnnnnnnnnnnnnnnnnnnnnnnnnnnnnnnnnnnnnnnnnnnnnnnnnnnnnnnnnnnnnnnnnnnnnnnnnnnnnnnnnnnnnnnnnnnnnnnnnnnnnnnnnnnnnnnnnnnnnnnnnnnnnnnnnnnnnnnnnnnnnnnnnnnnnnnnnnnnnnnnnnnnnnnnnnnnnnnnnnnnnnnnnnnnnnnnnnnnnnnnnnnnnnnnnnnnnnnnnnnnnnnnnnnnnnnnnnnnnnnnnnnnnnnnnnnnnnnnnnnnnnnnnnnnnnnnnnnnnnnnnnnnnnnnnnnnnnnnnnnnnnnnnnnnnnnnnnnnnnnnnnnnnnnnnnnnnnnnnnnnnnnnnnnnnnnnnnnnnnnnnnnnnnnnnnnnnnnnnnnnnnnnnnnnnnnnnnnnnnnnnnnnnnnnnnnnnnnnnnnnnnnnnnnnnnnnnnnnnnnnnnnnnnnnnnnnnnnnnnnnnnnnnnnnnnnnnnnnnnnnnnnnnnnnnnnnnnnnnnnnnnnnnnnnnnnnnnnnnnnnnnnnnnnnnnnnnnnnnnnnnnnnnnnnnnnnnnnnnnnnnnnnnnnnnnnnnnnnnnnnnnnnnnnnnnnnnnnnnnnnnnnnnnnnnnnnnnnnnnnnnnnnnnnnnnnnnnnnnnnnnnnnnnnnnnnnnnnnnnnnnnnnnnnnnnnnnnnnnnnnnnnnnnnnnnnnnnnnnnnnnnnnnnnnnnnnnnnnnnnnnnnnnnnnnnnnnnnnnnnnnnnnnnnnnnnnnnnnnnnnnnnnnnnnnnnnnnnnnnnnnnnnnnnnnnnnnnnnnnnnnnnnnnnnnnnnnnnnnnnnnnnnnnnnnnnnnnnnnnnnnnnnnnnnnnnnnnnnnnnnnnnnnnnnnnnnnnnnnnnnnnnnnnnnnnnnnnnnnnnnnnnnnnnnnnnnnnnnnnnnnnnnnnnnnnnnnnnnnnnnnnnnnnnnnnnnnnnnnnnnnnnnnnnnnnnnnnnnnnnnnnnnnnnnnnnnnnnnnnnnnnnnnnnnnnnnnnnnnnnnnnnnnnnnnnnnnnnnnnnnnnnnnnnnnnnnnnnnnnnnnnnnnnnnnnnnnnnnnnnnnnnnnnnnnnnnnnnnnnnnnnnnnnnnnnnnnnnnnnnnnnnnnnnnnnnnnnnnnnnnnnnnnnnnnnnnnnnnnnnnnnnnnnnnnnnnnnnnnnnnnnnnnnnnnnnnnnnnnnnnnnnnnnnnnnnnnnnnnnnnnnnnnnnnnnnnnnnnnnnnnnnnnnnnnnnnnnnnnnnnnnnnnnnnnnnnnnnnnnnnnnnnnnnnnnnnnnnnnnnnnnnnnnnnnnnnnnnnnnnnnnnnnnnnnnnnnnnnnnnnnnnnnnnnnnnnnnnnnnnnnnnnnnnnnnnnnnnnnnnnnnnnnnnnnnnnnnnnnnnnnnnnnnnnnnnnnnnnnnnnnnnnnnnnnnnnnnnnnnnnnnnnnnnnnnnnnnnnnnnnnnnnnnnnnnnnnnnnnnnnnnnnnnnnnnnnnnnnnnnnnnnnnnnnnnnnnnnnnnnnnnnnnnnnnnnnnnnnnnnnnnnnnnnnnnnnnnnnnnnnnnnnnnnnnnnnnnnnnnnnnnnnnnnnnnnnnnnnnnnnnnnnnnnnnnnnnnnnnnnnnnnnnnnnnnnnnnnnnnnnnnnnnnnnnnnnnnnnnnnnnnnnnnnnnnnnnnnnnnnnnnnnnnnnnnnnnnnnnnnnnnnnnnnnnnnnnnnnnnnnnnnnnnnnnnnnnnnnnnnnnnnnnnnnnnnnnnnnnnnnnnnnnnnnnnnnnnnnnnnnnnnnnnnnnnnnnnnnnnnnnnnnnnnnnnnnnnnnnnnnnnnnnnnnnnnnnnnnnnnnnnnnnnnnnnnnnnnnnnnnnnnnnnnnnnnnnnnnnnnnnnnnnnnnnnnnnnnnnnnnnnnnnnnnnnnnnnnnnnnnnnnnnnnnnnnnnnnnnnnnnnnnnnnnnnnnnnnnnnnnnnnnnnnnnnnnnnnnnnnnnnnnnnnnnnnnnnnnnnnnnnnnnnnnnnnnnnnnnnnnnnnnnnnnnnnnnnnnnnnnnnnnnnnnnnnnnnnnnnnnnnnnnnnnnnnnnnnnnnnnnnnnnnnnnnnnnnnnnnnnnnnnnnnnnnnnnnnnnnnnnnnnnnnnnnnnnnnnnnnnnnnnnnnnnnnnnnnnnnnnnnnnnnnnnnnnnnnnnnnnnnnnnnnnnnnnnnnnnnnnnnnnnnnnnnnnnnnnnnnnnnnnnnnnnnnnnnnnnnnnnnnnnnnnnnnnnnnnnnnnnnnnnnnnnnnnnnnnnnnnnnnnnnnnnnnnnnnnnnnnnnnnnnnnnnnnnnnnnnnnnnnnnnnnnnnnnnnnnnnnnnnnnnnnnnnnnnnnnnnnnnnnnnnnnnnnnnnnnnnnnnnnnnnnnnnnnnnnnnnnnnnnnnnnnnnnnnnnnnnnnnnnnnnnnnnnnnnnnnnnnnnnnnnnnnnnnnnnnnnnnnnnnnnnnnnnnnnnnnnnnnnnnnnnnnnnnnnnnnnnnnnnnnnnnnnnnnnnnnnnnnnnnnnnnnnnnnnnnnnnnnnnnnnnnnnnnnnnnnnnnnnnnnnnnnnnnnnnnnnnnnnnnnnnnnnnnnnnnnnnnnnnnnnnnnnnnnnnnnnnnnnnnnnnnnnnnnnnnnnnnnnnnnnnnnnnnnnnnnnnnnnnnnnnnnnnnnnnnnnnnnnnnnnnnnnnnnnnnnnnnnnnnnnnnnnnnnnnnnnnnnnnnnnnnnnnnnnnnnnnnnnnnnnnnnnnnnnnnnnnnnnnnnnnnnnnnnnnnnnnnnnnnnnnnnnnnnnnnnnnnnnnnnnnnnnnnnnnnnnnnnnnnnnnnnnnnnnnnnnnnnnnnnnnnnnnnnnnnnnnnnnnnnnnnnnnnnnnnnnnnnnnnnnnnnnnnnnnnnnnnnnnnnnnnnnnnnnnnnnnnnnnnnnnnnnnnnnnnnnnnnnnnnnnnnnnnnnnnnnnnnnnnnnnnnnnnnnnnnnnnnnnnnnnnnnnnnnnnnnnnnnnnnnnnnnnnnnnnnnnnnnnnnnnnnnnnnnnnnnnnnnnnnnnnnnnnnnnnnnnnnnnnnnnnnnnnnnnnnnnnnnnnnnnnnnnnnnnnnnnnnnnnnnnnnnnnnnnnnnnnnnnnnnnnnnnnnnnnnnnnnnnnnnnnnnnnnnnnnnnnnnnnnnnnnnnnnnnnnnnnnnnnnnnnnnnnnnnnnnnnnnnnnnnnnnnnnnnnnnnnnnnnnnnnnnnnnnnnnnnnnnnnnnnnnnnnnnnnnnnnnnnnnnnnnnnnnnnnnnnnnnnnnnnnnnnnnnnnnnnnnnnnnnnnnnnnnnnnnnnnnnnnnnnnnnnnnnnnnnnnnnnnnnnnnnnnnnnnnnnnnnnnnnnnnnnnnnnnnnnnnnnnnnnnnnnnnnnnnnnnnnnnnnnnnnnnnnnnnnnnnnnnnnnnnnnnnnnnnnnnnnnnnnnnnnnnnnnnnnnnnnnnnnnnnnnnnnnnnnnnnnnnnnnnnnnnnnnnnnnnnnnnnnnnnnnnnnnnnnnnnnnnnnnnnnnnnnnnnnnnnnnnnnnnnnnnnnnnnnnnnnnnnnnnnnnnnnnnnnnnnnnnnnnnnnnnnnnnnnnnnnnnnnnnnnnnnnnnnnnnnnnnnnnnnnnnnnnnnnnnnnnnnnnnnnnnnnnnnnnnnnnnnnnnnnnnnnnnnnnnnnnnnnnnnnnnnnnnnnnnnnnnnnnnnnnnnnnnnnnnnnnnnnnnnnnnnnnnnnnnnnnnnnnnnnnnnnnnnnnnnnnnnnnnnnnnnnnnnnnnnnnnnnnnnnnnnnnnnnnnnnnnnnnnnnnnnnnnnnnnnnnnnnnnnnnnnnnnnnnnnnnnnnnnnnnnnnnnnnnnnnnnnnnnnnnnnnnnnnnnnnnnnnnnnnnnnnnnnnnnnnnnnnnnnnnnnnnnnnnnnnnnnnnnnnnnnnnnnnnnnnnnnnnnnnnnnnnnnnnnnnnnnnnnnnnnnnnnnnnnnnnnnnnnnnnnnnnnnnnnnnnnnnnnnnnnnnnnnnnnnnnnnnnnnnnnnnnnnnnnnnnnnnnnnnnnnnnnnnnnnnnnnnnnnnnnnnnnnnnnnnnnnnnnnnnnnnnnnnnnnnnnnnnnnnnnnnnnnnnnnnnnnnnnnnnnnnnnnnnnnnnnnnnnnnnnnnnnnnnnnnnnnnnnnnnnnnnnnnnnnnnnnnnnnnnnnnnnnnnnnnnnnnnnnnnnnnnnnnnnnnnnnnnnnnnnnnnnnnnnnnnnnnnnnnnnnnnnnnnnnnnnnnnnnnnnnnnnnnnnnnnnnnnnnnnnnnnnnnnnnnnnnnnnnnnnnnnnnnnnnnnnnnnnnnnnnnnnnnnnnnnnnnnnnnnnnnnnnnnnnnnnnnnnnnnnnnnnnnnnnnnnnnnnnnnnnnnnnnnnnnnnnnnnnnnnnnnnnnnnnnnnnnnnnnnnnnnnnnnnnnnnnnnnnnnnnnnnnnnnnnnnnnnnnnnnnnnnnnnnnnnnnnnnnnnnnnnnnnnnnnnnnnnnnnnnnnnnnnnnnnnnnnnnnnnnnnnnnnnnnnnnnnnnnnnnnnnnnnnnnnnnnnnnnnnnnnnnnnnnnnnnnnnnnnnnnnnnnnnnnnnnnnnnnnnnnnnnnnnnnnnnnnnnnnnnnnnnnnnnnnnnnnnnnnnnnnnnnnnnnnnnnnnnnnnnnnnnnnnnnnnnnnnnnnnnnnnnnnnnnnnnnnnnnnnnnnnnnnnnnnnnnnnnnnnnnnnnnnnnnnnnnnnnnnnnnnnnnnnnnnnnnnnnnnnnnnnnnnnnnnnnnnnnnnnnnnnnnnnnnnnnnnnnnnnnnnnnnnnnnnnnnnnnnnnnnnnnnnnnnnnnnnnnnnnnnnnnnnnnnnnnnnnnnnnnnnnnnnnnnnnnnnnnnnnnnnnnnnnnnnnnnnnnnnnnnnnnnnnnnnnnnnnnnnnnnnnnnnnnnnnnnnnnnnnnnnnnnnnnnnnnnnnnnnnnnnnnnnnnnnnnnnnnnnnnnnnnnnnnnnnnnnnnnnnnnnnnnnnnnnnnnnnnnnnnnnnnnnnnnnnnnnnnnnnnnnnnnnnnnnnnnnnnnnnnnnnnnnnnnnnnnnnnnnnnnnnnnnnnnnnnnnnnnnnnnnnnnnnnnnnnnnnnnnnnnnnnnnnnnnnnnnnnnnnnnnnnnnnnnnnnnnnnnnnnnnnnnnnnnnnnnnnnnnnnnnnnnnnnnnnnnnnnnnnnnnnnnnnnnnnnnnnnnnnnnnnnnnnnnnnnnnnnnnnnnnnnnnnnnnnnnnnnnnnnnnnnnnnnnnnnnnnnnnnnnnnnnnnnnnnnnnnnnnnnnnnnnnnnnnnnnnnnnnnnnnnnnnnnnnnnnnnnnnnnnnnnnnnnnnnnnnnnnnnnnnnnnnnnnnnnnnnnnnnnnnnnnnnnnnnnnnnnnnnnnnnnnnnnnnnnnnnnnnnnnnnnnnnnnnnnnnnnnnnnnnnnnnnnnnnnnnnnnnnnnnnnnnnnnnnnnnnnnnnnnnnnnnnnnnnnnnnnnnnnnnnnnnnnnnnnnnnnnnnnnnnnnnnnnnnnnnnnnnnnnnnnnnnnnnnnnnnnnnnnnnnnnnnnnnnnnnnnnnnnnnnnnnnnnnnnnnnnnnnnnnnnnnnnnnnnnnnnnnnnnnnnnnnnnnnnnnnnnnnnnnnnnnnnnnnnnnnnnnnnnnnnnnnnnnnnnnnnnnnnnnnnnnnnnnnnnnnnnnnnnnnnnnnnnnnnnnnnnnnnnnnnnnnnnnnnnnnnnnnnnnnnnnnnnnnnnnnnnnnnnnnnnnnnnnnnnnnnnnnnnnnnnnnnnnnnnnnnnnnnnnnnnnnnnnnnnnnnnnnnnnnnnnnnnnnnnnnnnnnnnnnnnnnnnnnnnnnnnnnnnnnnnnnnnnnnnnnnnnnnnnnnnnnnnnnnnnnnnnnnnnnnnnnnnnnnnnnnnnnnnnnnnnnnnnnnnnnnnnnnnnnnnnnnnnnnnnnnnnnnnnnnnnnnnnnnnnnnnnnnnnnnnnnnnnnnnnnnnnnnnnnnnnnnnnnnnnnnnnnnnnnnnnnnnnnnnnnnnnnnnnnnnnnnnnnnnnnnnnnnnnnnnnnnnnnnnnnnnnnnnnnnnnnnnnnnnnnnnnnnnnnnnnnnnnnnnnnnnnnnnnnnnnnnnnnnnnnnnnnnnnnnnnnnnnnnnnnnnnnnnnnnnnnnnnnnnnnnnnnnnnnnnnnnnnnnnnnnnnnnnnnnnnnnnnnnnnnnnnnnnnnnnnnnnnnnnnnnnnnnnnnnnnnnnnnnnnnnnnnnnnnnnnnnnnnnnnnnnnnnnnnnnnnnnnnnnnnnnnnnnnnnnnnnnnnnnnnnnnnnnnnnnnnnnnnnnnnnnnnnnnnnnnnnnnnnnnnnnnnnnnnnnnnnnnnnnnnnnnnnnnnnnnnnnnnnnnnnnnnnnnnnnnnnnnnnnnnnnnnnnnnnnnnnnnnnnnnnnnnnnnnnnnnnnnnnnnnnnnnnnnnnnnnnnnnnnnnnnnnnnnnnnnnnnnnnnnnnnnnnnnnnnnnnnnnnnnnnnnnnnnnnnnnnnnnnnnnnnnnnnnnnnnnnnnnnnnnnnnnnnnnnnnnnnnnnnnnnnnnnnnnnnnnnnnnnnnnnnnnnnnnnnnnnnnnnnnnnnnnnnnnnnnnnnnnnnnnnnnnnnnnnnnnnnnnnnnnnnnnnnnnnnnnnnnnnnnnnnnnnnnnnnnnnnnnnnnnnnnnnnnnnnnnnnnnnnnnnnnnnnnnnnnnnnnnnnnnnnnnnnnnnnnnnnnnnnnnnnnnnnnnnnnnnnnnnnnnnnnnnnnnnnnnnnnnnnnnnnnnnnnnnnnnnnnnnnnnnnnnnnnnnnnnnnnnnnnnnnnnnnnnnnnnnnnnnnnnnnnnnnnnnnnnnnnnnnnnnnnnnnnnnnnnnnnnnnnnnnnnnnnnnnnnnnnnnnnnnnnnnnnnnnnnnnnnnnnnnnnnnnnnnnnnnnnnnnnnnnnnnnnnnnnnnnnnnnnnnnnnnnnnnnnnnnnnnnnnnnnnnnnnnnnnnnnnnnnnnnnnnnnnnnnnnnnnnnnnnnnnnnnnnnnnnnnnnnnnnnnnnnnnnnnnnnnnnnnnnnnnnnnnnnnnnnnnnnnnnnnnnnnnnnnnnnnnnnnnnnnnnnnnnnnnnnnnnnnnnnnnnnnnnnnnnnnnnnnnnnnnnnnnnnnnnnnnnnnnnnnnnnnnnnnnnnnnnnnnnnnnnnnnnnnnnnnnnnnnnnnnnnnnnnnnnnnnnnnnnnnnnnnnnnnnnnnnnnnnnnnnnnnnnnnnnnnnnnnnnnnnnnnnnnnnnnnnnnnnnnnnnnnnnnnnnnnnnnnnnnnnnnnnnnnnnnnnnnnnnnnnnnnnnnnnnnnnnnnnnnnnnnnnnnnnnnnnnnnnnnnnnnnnnnnnnnnnnnnnnnnnnnnnnnnnnnnnnnnnnnnnnnnnnnnnnnnnnnnnnnnnnnnnnnnnnnnnnnnnnnnnnnnnnnnnnnnnnnnnnnnnnnnnnnnnnnnnnnnnnnnnnnnnnnnnnnnnnnnnnnnnnnnnnnnnnnnnnnnnnnnnnnnnnnnnnnnnnnnnnnnnnnnnnnnnnnnnnnnnnnnnnnnnnnnnnnnnnnnnnnnnnnnnnnnnnnnnnnnnnnnnnnnnnnnnnnnnnnnnnnnnnnnnnnnnnnnnnnnnnnnnnnnnnnnnnnnnnnnnnnnnnnnnnnnnnnnnnnnnnnnnnnnnnnnnnnnnnnnnnnnnnnnnnnnnnnnnnnnnnnnnnnnnnnnnnnnnnnnnnnnnnnnnnnnnnnnnnnnnnnnnnnnnnnnnnnnnnnnnnnnnnnnnnnnnnnnnnnnnnnnnnnnnnnnnnnnnnnnnnnnnnnnnnnnnnnnnnnnnnnnnnnnnnnnnnnnnnnnnnnnnnnnnnnnnnnnnnnnnnnnnnnnnnnnnnnnnnnnnnnnnnnnnnnnnnnnnnnnnnnnnnnnnnnnnnnnnnnnnnnnnnnnnnnnnnnnnnnnnnnnnnnnnnnnnnnnnnnnnnnnnnnnnnnnnnnnnnnnnnnnnnnnnnnnnnnnnnnnnnnnnnnnnnnnnnnnnnnnnnnnnnnnnnnnnnnnnnnnnnnnnnnnnnnnnnnnnnnnnnnnnnnnnnnnnnnnnnnnnnnnnnnnnnnnnnnnnnnnnnnnnnnnnnnnnnnnnnnnnnnnnnnnnnnnnnnnnnnnnnnnnnnnnnnnnnnnnnnnnnnnnnnnnnnnnnnnnnnnnnnnnnnnnnnnnnnnnnnnnnnnnnnnnnnnnnnnnnnnnnnnnnnnnnnnnnnnnnnnnnnnnnnnnnnnnnnnnnnnnnnnnnnnnnnnnnnnnnnnnnnnnnnnnnnnnnnnnnnnnnnnnnnnnnnnnnnnnnnnnnnnnnnnnnnnnnnnnnnnnnnnnnnnnnnnnnnnnnnnnnnnnnnnnnnnnnnnnnnnnnnnnnnnnnnnnnnnnnnnnnnnnnnnnnnnnnnnnnnnnnnnnnnnnnnnnnnnnnnnnnnnnnnnnnnnnnnnnnnnnnnnnnnnnnnnnnnnnnnnnnnnnnnnnnnnnnnnnnnnnnnnnnnnnnnnnnnnnnnnnnnnnnnnnnnnnnnnnnnnnnnnnnnnnnnnnnnnnnnnnnnnnnnnnnnnnnnnnnnnnnnnnnnnnnnnnnnnnnnnnnnnnnnnnnnnnnnnnnnnnnnnnnnnnnnnnnnnnnnnnnnnnnnnnnnnnnnnnnnnnnnnnnnnnnnnnnnnnnnnnnnnnnnnnnnnnnnnnnnnnnnnnnnnnnnnnnnnnnnnnnnnnnnnnnnnnnnnnnnnnnnnnnnnnnnnnnnnnnnnnnnnnnnnnnnnnnnnnnnnnnnnnnnnnnnnnnnnnnnnnnnnnnnnnnnnnnnnnnnnnnnnnnnnnnnnnnnnnnnnnnnnnnnnnnnnnnnnnnnnnnnnnnnnnnnnnnnnnnnnnnnnnnnnnnnnnnnnnnnnnnnnnnnnnnnnnnnnnnnnnnnnnnnnnnnnnnnnnnnnnnnnnnnnnnnnnnnnnnnnnnnnnnnnnnnnnnnnnnnnnnnnnnnnnnnnnnnnnnnnnnnnnnnnnnnnnnnnnnnnnnnnnnnnnnnnnnnnnnnnnnnnnnnnnnnnnnnnnnnnnnnnnnnnnnnnnnnnnnnnnnnnnnnnnnnnnnnnnnnnnnnnnnnnnnnnnnnnnnnnnnnnnnnnnnnnnnnnnnnnnnnnnnnnnnnnnnnnnnnnnnnnnnnnnnnnnnnnnnnnnnnnnnnnnnnnnnnnnnnnnnnnnnnnnnnnnnnnnnnnnnnnnnnnnnnnnnnnnnnnnnnnnnnnnnnnnnnnnnnnnnnnnnnnnnnnnnnnnnnnnnnnnnnnnnnnnnnnnnnnnnnnnnnnnnnnnnnnnnnnnnnnnnnnnnnnnnnnnnnnnnnnnnnnnnnnnnnnnnnnnnnnnnnnnnnnnnnnnnnnnnnnnnnnnnnnnnnnnnnnnnnnnnnnnnnnnnnnnnnnnnnnnnnnnnnnnnnnnnnnnnnnnnnnnnnnnnnnnnnnnnnnnnnnnnnnnnnnnnnnnnnnnnnnnnnnnnnnnnnnnnnnnnnnnnnnnnnnnnnnnnnnnnnnnnnnnnnnnnnnnnnnnnnnnnnnnnnnnnnnnnnnnnnnnnnnnnnnnnnnnnnnnnnnnnnnnnnnnnnnnnnnnnnnnnnnnnnnnnnnnnnnnnnnnnnnnnnnnnnnnnnnnnnnnnnnnnnnnnnnnnnnnnnnnnnnnnnnnnnnnnnnnnnnnnnnnnnnnnnnnnnnnnnnnnnnnnnnnnnnnnnnnnnnnnnnnnnnnnnnnnnnnnnnnnnnnnnnnnnnnnnnnnnnnnnnnnnnnnnnnnnnnnnnnnnnnnnnnnnnnnnnnnnnnnnnnnnnnnnnnnnnnnnnnnnnnnnnnnnnnnnnnnnnnnnnnnnnnnnnnnnnnnnnnnnnnnnnnnnnnnnnnnnnnnnnnnnnnnnnnnnnnnnnnnnnnnnnnnnnnnnnnnnnnnnnnnnnnnnnnnnnnnnnnnnnnnnnnnnnnnnnnnnnnnnnnnnnnnnnnnnnnnnnnnnnnnnnnnnnnnnnnnnnnnnnnnnnnnnnnnnnnnnnnnnnnnnnnnnnnnnnnnnnnnnnnnnnnnnnnnnnnnnnnnnnnnnnnnnnnnnnnnnnnnnnnnnnnnnnnnnnnnnnnnnnnnnnnnnnnnnnnnnnnnnnnnnnnnnnnnnnnnnnnnnnnnnnnnnnnnnnnnnnnnnnnnnnnnnnnnnnnnnnnnnnnnnnnnnnnnnnnnnnnnnnnnnnnnnnnnnnnnnnnnnnnnnnnnnnnnnnnnnnnnnnnnnnnnnnnnnnnnnnnnnnnnnnnnnnnnnnnnnnnnnnnnnnnnnnnnnnnnnnnnnnnnnnnnnnnnnnnnnnnnnnnnnnnnnnnnnnnnnnnnnnnnnnnnnnnnnnnnnnnnnnnnnnnnnnnnnnnnnnnnnnnnnnnnnnnnnnnnnnnnnnnnnnnnnnnnnnnnnnnnnnnnnnnnnnnnnnnnnnnnnnnnnnnnnnnnnnnnnnnnnnnnnnnnnnnnnnnnnnnnnnnnnnnnnnnnnnnnnnnnnnnnnnnnnnnnnnnnnnnnnnnnnnnnnnnnnnnnnnnnnnnnnnnnnnnnnnnnnnnnnnnnnnnnnnnnnnnnnnnnnnnnnnnnnnnnnnnnnnnnnnnnnnnnnnnnnnnnnnnnnnnnnnnnnnnnnnnnnnnnnnnnnnnnnnnnnnnnnnnnnnnnnnnnnnnnnnnnnnnnnnnnnnnnnnnnnnnnnnnnnnnnnnnnnnnnnnnnnnnnnnnnnnnnnnnnnnnnnnnnnnnnnnnnnnnnnnnnnnnnnnnnnnnnnnnnnnnnnnnnnnnnnnnnnnnnnnnnnnnnnnnnnnnnnnnnnnnnnnnnnnnnnnnnnnnnnnnnnnnnnnnnnnnnnnnnnnnnnnnnnnnnnnnnnnnnnnnnnnnnnnnnnnnnnnnnnnnnnnnnnnnnnnnnnnnnnnnnnnnnnnnnnnnnnnnnnnnnnnnnnnnnnnnnnnnnnnnnnnnnnnnnnnnnnnnnnnnnnnnnnnnnnnnnnnnnnnnnnnnnnnnnnnnnnnnnnnnnnnnnnnnnnnnnnnnnnnnnnnnnnnnnnnnnnnnnnnnnnnnnnnnnnnnnnnnnnnnnnnnnnnnnnnnnnnnnnnnnnnnnnnnnnnnnnnnnnnnnnnnnnnnnnnnnnnnnnnnnnnnnnnnnnnnnnnnnnnnnnnnnnnnnnnnnnnnnnnnnnnnnnnnnnnnnnnnnnnnnnnnnnnnnnnnnnnnnnnnnnnnnnnnnnnnnnnnnnnnnnnnnnnnnnnnnnnnnnnnnnnnnnnnnnnnnnnnnnnnnnnnnnnnnnnnnnnnnnnnnnnnnnnnnnnnnnnnnnnnnnnnnnnnnnnnnnnnnnnnnnnnnnnnnnnnnnnnnnnnnnnnnnnnnnnnnnnnnnnnnnnnnnnnnnnnnnnnnnnnnnnnnnnnnnnnnnnnnnnnnnnnnnnnnnnnnnnnnnnnnnnnnnnnnnnnnnnnnnnnnnnnnnnnnnnnnnnnnnnnnnnnnnnnnnnnnnnnnnnnnnnnnnnnnnnnnnnnnnnnnnnnnnnnnnnnnnnnnnnnnnnnnnnnnnnnnnnnnnnnnnnnnnnnnnnnnnnnnnnnnnnnnnnnnnnnnnnnnnnnnnnnnnnnnnnnnnnnnnnnnnnnnnnnnnnnnnnnnnnnnnnnnnnnnnnnnnnnnnnnnnnnnnnnnnnnnnnnnnnnnnnnnnnnnnnnnnnnnnnnnnnnnnnnnnnnnnnnnnnnnnnnnnnnnnnnnnnnnnnnnnnnnnnnnnnnnnnnnnnnnnnnnnnnnnnnnnnnnnnnnnnnnnnnnnnnnnnnnnnnnnnnnnnnnnnnnnnnnnnnnnnnnnnnnnnnnnnnnnnnnnnnnnnnnnnnnnnnnnnnnnnnnnnnnnnnnnnnnnnnnnnnnnnnnnnnnnnnnnnnnnnnnnnnnnnnnnnnnnnnnnnnnnnnnnnnnnnnnnnnnnnnnnnnnnnnnnnnnnnnnnnnnnnnnnnnnnnnnnnnnnnnnnnnnnnnnnnnnnnnnnnnnnnnnnnnnnnnnnnnnnnnnnnnnnnnnnnnnnnnnnnnnnnnnnnnnnnnnnnnnnnnnnnnnnnnnnnnnnnnnnnnnnnnnnnnnnnnnnnnnnnnnnnnnnnnnnnnnnnnnnnnnnnnnnnnnnnnnnnnnnnnnnnnnnnnnnnnnnnnnnnnnnnnnnnnnnnnnnnnnnnnnnnnnnnnnnnnnnnnnnnnnnnnnnnnnnnnnnnnnnnnnnnnnnnnnnnnnnnnnnnnnnnnnnnnnnnnnnnnnnnnnnnnnnnnnnnnnnnnnnnnnnnnnnnnnnnnnnnnnnnnnnnnnnnnnnnnnnnnnnnnnnnnnnnnnnnnnnnnnnnnnnnnnnnnnnnnnnnnnnnnnnnnnnnnnnnnnnnnnnnnnnnnnnnnnnnnnnnnnnnnnnnnnnnnnnnnnnnnnnnnnnnnnnnnnnnnnnnnnnnnnnnnnnnnnnnnnnnnnnnnnnnnnnnnnnnnnnnnnnnnnnnnnnnnnnnnnnnnnnnnnnnnnnnnnnnnnnnnnnnnnnnnnnnnnnnnnnnnnnnnnnnnnnnnnnnnnnnnnnnnnnnnnnnnnnnnnnnnnnnnnnnnnnnnnnnnnnnnnnnnnnnnnnnnnnnnnnnnnnnnnnnnnnnnnnnnnnnnnnnnnnnnnnnnnnnnnnnnnnnnnnnnnnnnnnnnnnnnnnnnnnnnnnnnnnnnnnnnnnnnnnnnnnnnnnnnnnnnnnnnnnnnnnnnnnnnnnnnnnnnnnnnnnnnnnnnnnnnnnnnnnnnnnnnnnnnnnnnnnnnnnnnnnnnnnnnnnnnnnnnnnnnnnnnnnnnnnnnnnnnnnnnnnnnnnnnnnnnnnnnnnnnnnnnnnnnnnnnnnnnnnnnnnnnnnnnnnnnnnnnnnnnnnnnnnnnnnnnnnnnnnnnnnnnnnnnnnnnnnnnnnnnnnnnnnnnnnnnnnnnnnnnnnnnnnnnnnnnnnnnnnnnnnnnnnnnnnnnnnnnnnnnnnnnnnnnnnnnnnnnnnnnnnnnnnnnnnnnnnnnnnnnnnnnnnnnnnnnnnnnnnnnnnnnnnnnnnnnnnnnnnnnnnnnnnnnnnnnnnnnnnnnnnnnnnnnnnnnnnnnnnnnnnnnnnnnnnnnnnnnnnnnnnnnnnnnnnnnnnnnnnnnnnnnnnnnnnnnnnnnnnnnnnnnnnnnnnnnnnnnnnnnnnnnnnnnnnnnnnnnnnnnnnnnnnnnnnnnnnnnnnnnnnnnnnnnnnnnnnnnnnnnnnnnnnnnnnnnnnnnnnnnnnnnnnnnnnnnnnnnnnnnnnnnnnnnnnnnnnnnnnnnnnnnnnnnnnnnnnnnnnnnnnnnnnnnnnnnnnnnnnnnnnnnnnnnnnnnnnnnnnnnnnnnnnnnnnnnnnnnnnnnnnnnnnnnnnnnnnnnnnnnnnnnnnnnnnnnnnnnnnnnnnnnnnnnnnnnnnnnnnnnnnnnnnnnnnnnnnnnnnnnnnnnnnnnnnnnnnnnnnnnnnnnnnnnnnnnnnnnnnnnnnnnnnnnnnnnnnnnnnnnnnnnnnnnnnnnnnnnnnnnnnnnnnnnnnnnnnnnnnnnnnnnnnnnnnnnnnnnnnnnnnnnnnnnnnnnnnnnnnnnnnnnnnnnnnnnnnnnnnnnnnnnnnnnnnnnnnnnnnnnnnnnnnnnnnnnnnnnnnnnnnnnnnnnnnnnnnnnnnnnnnnnnnnnnnnnnnnnnnnnnnnnnnnnnnnnnnnnnnnnnnnnnnnnnnnnnnnnnnnnnnnnnnnnnnnnnnnnnnnnnnnnnnnnnnnnnnnnnnnnnnnnnnnnnnnnnnnnnnnnnnnnnnnnnnnnnnnnnnnnnnnnnnnnnnnnnnnnnnnnnnnnnnnnnnnnnnnnnnnnnnnnnnnnnnnnnnnnnnnnnnnnnnnnnnnnnnnnnnnnnnnnnnnnnnnnnnnnnnnnnnnnnnnnnnnnnnnnnnnnnnnnnnnnnnnnnnnnnnnnnnnnnnnnnnnnnnnnnnnnnnnnnnnnnnnnnnnnnnnnnnnnnnnnnnnnnnnnnnnnnnnnnnnnnnnnnnnnnnnnnnnnnnnnnnnnnnnnnnnnnnnnnnnnnnnnnnnnnnnnnnnnnnnnnnnnnnnnnnnnnnnnnnnnnnnnnnnnnnnnnnnnnnnnnnnnnnnnnnnnnnnnnnnnnnnnnnnnnnnnnnnnnnnnnnnnnnnnnnnnnnnnnnnnnnnnnnnnnnnnnnnnnnnnnnnnnnnnnnnnnnnnnnnnnnnnnnnnnnnnnnnnnnnnnnnnnnnnnnnnnnnnnnnnnnnnnnnnnnnnnnnnnnnnnnnnnnnnnnnnnnnnnnnnnnnnnnnnnnnnnnnnnnnnnnnnnnnnnnnnnnnnnnnnnnnnnnnnnnnnnnnnnnnnnnnnnnnnnnnnnnnnnnnnnnnnnnnnnnnnnnnnnnnnnnnnnnnnnnnnnnnnnnnnnnnnnnnnnnnnnnnnnnnnnnnnnnnnnnnnnnnnnnnnnnnnnnnnnnnnnnnnnnnnnnnnnnnnnnnnnnnnnnnnnnnnnnnnnnnnnnnnnnnnnnnnnnnnnnnnnnnnnnnnnnnnnnnnnnnnnnnnnnnnnnnnnnnnnnnnnnnnnnnnnnnnnnnnnnnnnnnnnnnnnnnnnnnnnnnnnnnnnnnnnnnnnnnnnnnnnnnnnnnnnnnnnnnnnnnnnnnnnnnnnnnnnnnnnnnnnnnnnnnnnnnnnnnnnnnnnnnnnnnnnnnnnnnnnnnnnnnnnnnnnnnnnnnnnnnnnnnnnnnnnnnnnnnnnnnnnnnnnnnnnnnnnnnnnnnnnnnnnnnnnnnnnnnnnnnnnnnnnnnnnnnnnnnnnnnnnnnnnnnnnnnnnnnnnnnnnnnnnnnnnnnnnnnnnnnnnnnnnnnnnnnnnnnnnnnnnnnnnnnnnnnnnnnnnnnnnnnnnnnnnnnnnnnnnnnnnnnnnnnnnnnnnnnnnnnnnnnnnnnnnnnnnnnnnnnnnnnnnnnnnnnnnnnnnnnnnnnnnnnnnnnnnnnnnnnnnnnnnnnnnnnnnnnnnnnnnnnnnnnnnnnnnnnnnnnnnnnnnnnnnnnnnnnnnnnnnnnnnnnnnnnnnnnnnnnnnnnnnnnnnnnnnnnnnnnnnnnnnnnnnnnnnnnnnnnnnnnnnnnnnnnnnnnnnnnnnnnnnnnnnnnnnnnnnnnnnnnnnnnnnnnnnnnnnnnnnnnnnnnnnnnnnnnnnnnnnnnnnnnnnnnnnnnnnnnnnnnnnnnnnnnnnnnnnnnnnnnnnnnnnnnnnnnnnnnnnnnnnnnnnnnnnnnnnnnnnnnnnnnnnnnnnnnnnnnnnnnnnnnnnnnnnnnnnnnnnnnnnnnnnnnnnnnnnnnnnnnnnnnnnnnnnnnnnnnnnnnnnnnnnnnnnnnnnnnnnnnnnnnnnnnnnnnnnnnnnnnnnnnnnnnnnnnnnnnnnnnnnnnnnnnnnnnnnnnnnnnnnnnnnnnnnnnnnnnnnnnnnnnnnnnnnnnnnnnnnnnnnnnnnnnnnnnnnnnnnnnnnnnnnnnnnnnnnnnnnnnnnnnnnnnnnnnnnnnnnnnnnnnnnnnnnnnnnnnnnnnnnnnnnnnnnnnnnnnnnnnnnnnnnnnnnnnnnnnnnnnnnnnnnnnnnnnnnnnnnnnnnnnnnnnnnnnnnnnnnnnnnnnnnnnnnnnnnnnnnnnnnnnnnnnnnnnnnnnnnnnnnnnnnnnnnnnnnnnnnnnnnnnnnnnnnnnnnnnnnnnnnnnnnnnnnnnnnnnnnnnnnnnnnnnnnnnnnnnnnnnnnnnnnnnnnnnnnnnnnnnnnnnnnnnnnnnnnnnnnnnnnnnnnnnnnnnnnnnnnnnnnnnnnnnnnnnnnnnnnnnnnnnnnnnnnnnnnnnnnnnnnnnnnnnnnnnnnnnnnnnnnnnnnnnnnnnnnnnnnnnnnnnnnnnnnnnnnnnnnnnnnnnnnnnnnnnnnnnnnnnnnnnnnnnnnnnnnnnnnnnnnnnnnnnnnnnnnnnnnnnnnnnnnnnnnnnnnnnnnnnnnnnnnnnnnnnnnnnnnnnnnnnnnnnnnnnnnnnnnnnnnnnnnnnnnnnnnnnnnnnnnnnnnnnnnnnnnnnnnnnnnnnnnnnnnnnnnnnnnnnnnnnnnnnnnnnnnnnnnnnnnnnnnnnnnnnnnnnnnnnnnnnnnnnnnnnnnnnnnnnnnnnnnnnnnnnnnnnnnnnnnnnnnnnnnnnnnnnnnnnnnnnnnnnnnnnnnnnnnnnnnnnnnnnnnnnnnnnnnnnnnnnnnnnnnnnnnnnnnnnnnnnnnnnnnnnnnnnnnnnnnnnnnnnnnnnnnnnnnnnnnnnnnnnnnnnnnnnnnnnnnnnnnnnnnnnnnnnnnnnnnnnnnnnnnnnnnnnnnnnnnnnnnnnnnnnnnnnnnnnnnnnnnnnnnnnnnnnnnnnnnnnnnnnnnnnnnnnnnnnnnnnnnnnnnnnnnnnnnnnnnnnnnnnnnnnnnnnnnnnnnnnnnnnnnnnnnnnnnnnnnnnnnnnnnnnnnnnnnnnnnnnnnnnnnnnnnnnnnnnnnnnnnnnnnnnnnnnnnnnnnnnnnnnnnnnnnnnnnnnnnnnnnnnnnnnnnnnnnnnnnnnnnnnnnnnnnnnnnnnnnnnnnnnnnnnnnnnnnnnnnnnnnnnnnnnnnnnnnnnnnnnnnnnnnnnnnnnnnnnnnnnnnnnnnnnnnnnnnnnnnnnnnnnnnnnnnnnnnnnnnnnnnnnnnnnnnnnnnnnnnnnnnnnnnnnnnnnnnnnnnnnnnnnnnnnnnnnnnnnnnnnnnnnnnnnnnnnnnnnnnnnnnnnnnnnnnnnnnnnnnnnnnnnnnnnnnnnnnnnnnnnnnnnnnnnnnnnnnnnnnnnnnnnnnnnnnnnnnnnnnnnnnnnnnnnnnnnnnnnnnnnnnnnnnnnnnnnnnnnnnnnnnnnnnnnnnnnnnnnnnnnnnnnnnnnnnnnnnnnnnnnnnnnnnnnnnnnnnnnnnnnnnnnnnnnnnnnnnnnnnnnnnnnnnnnnnnnnnnnnnnnnnnnnnnnnnnnnnnnnnnnnnnnnnnnnnnnnnnnnnnnnnnnnnnnnnnnnnnnnnnnnnnnnnnnnnnnnnnnnnnnnnnnnnnnnnnnnnnnnnnnnnnnnnnnnnnnnnnnnnnnnnnnnnnnnnnnnnnnnnnnnnnnnnnnnnnnnnnnnnnnnnnnnnnnnnnnnnnnnnnnnnnnnnnnnnnnnnnnnnnnnnnnnnnnnnnnnnnnnnnnnnnnnnnnnnnnnnnnnnnnnnnnnnnnnnnnnnnnnnnnnnnnnnnnnnnnnnnnnnnnnnnnnnnnnnnnnnnnnnnnnnnnnnnnnnnnnnnnnnnnnnnnnnnnnnnnnnnnnnnnnnnnnnnnnnnnnnnnnnnnnnnnnnnnnnnnnnnnnnnnnnnnnnnnnnnnnnnnnnnnnnnnnnnnnnnnnnnnnnnnnnnnnnnnnnnnnnnnnnnnnnnnnnnnnnnnnnnnnnnnnnnnnnnnnnnnnnnnnnnnnnnnnnnnnnnnnnnnnnnnnnnnnnnnnnnnnnnnnnnnnnnnnnnnnnnnnnnnnnnnnnnnnnnnnnnnnnnnnnnnnnnnnnnnnnnnnnnnnnnnnnnnnnnnnnnnnnnnnnnnnnnnnnnnnnnnnnnnnnnnnnnnnnnnnnnnnnnnnnnnnnnnnnnnnnnnnnnnnnnnnnnnnnnnnnnnnnnnnnnnnnnnnnnnnnnnnnnnnnnnnnnnnnnnnnnnnnnnnnnnnnnnnnnnnnnnnnnnnnnnnnnnnnnnnnnnnnnnnnnnnnnnnnnnnnnnnnnnnnnnnnnnnnnnnnnnnnnnnnnnnnnnnnnnnnnnnnnnnnnnnnnnnnnnnnnnnnnnnnnnnnnnnnnnnnnnnnnnnnnnnnnnnnnnnnnnnnnnnnnnnnnnnnnnnnnnnnnnnnnnnnnnnnnnnnnnnnnnnnnnnnnnnnnnnnnnnnnnnnnnnnnnnnnnnnnnnnnnnnnnnnnnnnnnnnnnnnnnnnnnnnnnnnnnnnnnnnnnnnnnnnnnnnnnnnnnnnnnnnnnnnnnnnnnnnnnnnnnnnnnnnnnnnnnnnnnnnnnnnnnnnnnnnnnnnnnnnnnnnnnnnnnnnnnnnnnnnnnnnnnnnnnnnnnnnnnnnnnnnnnnnnnnnnnnnnnnnnnnnnnnnnnnnnnnnnnnnnnnnnnnnnnnnnnnnnnnnnnnnnnnnnnnnnnnnnnnnnnnnnnnnnnnnnnnnnnnnnnnnnnnnnnnnnnnnnnnnnnnnnnnnnnnnnnnnnnnnnnnnnnnnnnnnnnnnnnnnnnnnnnnnnnnnnnnnnnnnnnnnnnnnnnnnnnnnnnnnnnnnnnnnnnnnnnnnnnnnnnnnnnnnnnnnnnnnnnnnnnnnnnnnnnnnnnnnnnnnnnnnnnnnnnnnnnnnnnnnnnnnnnnnnnnnnnnnnnnnnnnnnnnnnnnnnnnnnnnnnnnnnnnnnnnnnnnnnnnnnnnnnnnnnnnnnnnnnnnnnnnnnnnnnnnnnnnnnnnnnnnnnnnnnnnnnnnnnnnnnnnnnnnnnnnnnnnnnnnnnnnnnnnnnnnnnnnnnnnnnnnnnnnnnnnnnnnnnnnnnnnnnnnnnnnnnnnnnnnnnnnnnnnnnnnnnnnnnnnnnnnnnnnnnnnnnnnnnnnnnnnnnnnnnnnnnnnnnnnnnnnnnnnnnnnnnnnnnnnnnnnnnnnnnnnnnnnnnnnnnnnnnnnnnnnnnnnnnnnnnnnnnnnnnnnnnnnnnnnnnnnnnnnnnnnnnnnnnnnnnnnnnnnnnnnnnnnnnnnnnnnnnnnnnnnnnnnnnnnnnnnnnnnnnnnnnnnnnnnnnnnnnnnnnnnnnnnnnnnnnnnnnnnnnnnnnnnnnnnnnnnnnnnnnnnnnnnnnnnnnnnnnnnnnnnnnnnnnnnnnnnnnnnnnnnnnnnnnnnnnnnnnnnnnnnnnnnnnnnnnnnnnnnnnnnnnnnnnnnnnnnnnnnnnnnnnnnnnnnnnnnnnnnnnnnnnnnnnnnnnnnnnnnnnnnnnnnnnnnnnnnnnnnnnnnnnnnnnnnnnnnnnnnnnnnnnnnnnnnnnnnnnnnnnnnnnnnnnnnnnnnnnnnnnnnnnnnnnnnnnnnnnnnnnnnnnnnnnnnnnnnnnnnnnnnnnnnnnnnnnnnnnnnnnnnnnnnnnnnnnnnnnnnnnnnnnnnnnnnnnnnnnnnnnnnnnnnnnnnnnnnnnnnnnnnnnnnnnnnnnnnnnnnnnnnnnnnnnnnnnnnnnnnnnnnnnnnnnnnnnnnnnnnnnnnnnnnnnnnnnnnnnnnnnnnnnnnnnnnnnnnnnnnnnnnnnnnnnnnnnnnnnnnnnnnnnnnnnnnnnnnnnnnnnnnnnnnnnnnnnnnnnnnnnnnnnnnnnnnnnnnnnnnnnnnnnnnnnnnnnnnnnnnnnnnnnnnnnnnnnnnnnnnnnnnnnnnnnnnnnnnnnnnnnnnnnnnnnnnnnnnnnnnnnnnnnnnnnnnnnnnnnnnnnnnnnnnnnnnnnnnnnnnnnnnnnnnnnnnnnnnnnnnnnnnnnnnnnnnnnnnnnnnnnnnnnnnnnnnnnnnnnnnnnnnnnnnnnnnnnnnnnnnnnnnnnnnnnnnnnnnnnnnnnnnnnnnnnnnnnnnnnnnnnnnnnnnnnnnnnnnnnnnnnnnnnnnnnnnnnnnnnnnnnnnnnnnnnnnnnnnnnnnnnnnnnnnnnnnnnnnnnnnnnnnnnnnnnnnnnnnnnnnnnnnnnnnnnnnnnnnnnnnnnnnnnnnnnnnnnnnnnnnnnnnnnnnnnnnnnnnnnnnnnnnnnnnnnnnnnnnnnnnnnnnnnnnnnnnnnnnnnnnnnnnnnnnnnnnnnnnnnnnnnnnnnnnnnnnnnnnnnnnnnnnnnnnnnnnnnnnnnnnnnnnnnnnnnnnnnnnnnnnnnnnnnnnnnnnnnnnnnnnnnnnnnnnnnnnnnnnnnnnnnnnnnnnnnnnnnnnnnnnnnnnnnnnnnnnnnnnnnnnnnnnnnnnnnnnnnnnnnnnnnnnnnnnnnnnnnnnnnnnnnnnnnnnnnnnnnnnnnnnnnnnnnnnnnnnnnnnnnnnnnnnnnnnnnnnnnnnnnnnnnnnnnnnnnnnnnnnnnnnnnnnnnnnnnnnnnnnnnnnnnnnnnnnnnnnnnnnnnnnnnnnnnnnnnnnnnnnnnnnnnnnnnnnnnnnnnnnnnnnnnnnnnnnnnnnnnnnnnnnnnnnnnnnnnnnnnnnnnnnnnnnnnnnnnnnnnnnnnnnnnnnnnnnnnnnnnnnnnnnnnnnnnnnnnnnnnnnnnnnnnnnnnnnnnnnnnnnnnnnnnnnnnnnnnnnnnnnnnnnnnnnnnnnnnnnnnnnnnnnnnnnnnnnnnnnnnnnnnnnnnnnnnnnnnnnnnnnnnnnnnnnnnnnnnnnnnnnnnnnnnnnnnnnnnnnnnnnnnnnnnnnnnnnnnnnnnnnnnnnnnnnnnnnnnnnnnnnnnnnnnnnnnnnnnnnnnnnnnnnnnnnnnnnnnnnnnnnnnnnnnnnnnnnnnnnnnnnnnnnnnnnnnnnnnnnnnnnnnnnnnnnnnnnnnnnnnnnnnnnnnnnnnnnnnnnnnnnnnnnnnnnnnnnnnnnnnnnnnnnnnnnnnnnnnnnnnnnnnnnnnnnnnnnnnnnnnnnnnnnnnnnnnnnnnnnnnnnnnnnnnnnnnnnnnnnnnnnnnnnnnnnnnnnnnnnnnnnnnnnnnnnnnnnnnnnnnnnnnnnnnnnnnnnnnnnnnnnnnnnnnnnnnnnnnnnnnnnnnnnnnnnnnnnnnnnnnnnnnnnnnnnnnnnnnnnnnnnnnnnnnnnnnnnnnnnnnnnnnnnnnnnnnnnnnnnnnnnnnnnnnnnnnnnnnnnnnnnnnnnnnnnnnnnnnnnnnnnnnnnnnnnnnnnnnnnnnnnnnnnnnnnnnnnnnnnnnnnnnnnnnnnnnnnnnnnnnnnnnnnnnnnnnnnnnnnnnnnnnnnnnnnnnnnnnnnnnnnnnnnnnnnnnnnnnnnnnnnnnnnnnnnnnnnnnnnnnnnnnnnnnnnnnnnnnnnnnnnnnnnnnnnnnnnnnnnnnnnnnnnnnnnnnnnnnnnnnnnnnnnnnnnnnnnnnnnnnnnnnnnnnnnnnnnnnnnnnnnnnnnnnnnnnnnnnnnnnnnnnnnnnnnnnnnnnnnnnnnnnnnnnnnnnnnnnnnnnnnnnnnnnnnnnnnnnnnnnnnnnnnnnnnnnnnnnnnnnnnnnnnnnnnnnnnnnnnnnnnnnnnnnnnnnnnnnnnnnnnnnnnnnnnnnnnnnnnnnnnnnnnnnnnnnnnnnnnnnnnnnnnnnnnnnnnnnnnnnnnnnnnnnnnnnnnnnnnnnnnnnnnnnnnnnnnnnnnnnnnnnnnnnnnnnnnnnnnnnnnnnnnnnnnnnnnnnnnnnnnnnnnnnnnnnnnnnnnnnnnnnnnnnnnnnnnnnnnnnnnnnnnnnnnnnnnnnnnnnnnnnnnnnnnnnnnnnnnnnnnnnnnnnnnnnnnnnnnnnnnnnnnnnnnnnnnnnnnnnnnnnnnnnnnnnnnnnnnnnnnnnnnnnnnnnnnnnnnnnnnnnnnnnnnnnnnnnnnnnnnnnnnnnnnnnnnnnnnnnnnnnnnnnnnnnnnnnnnnnnnnnnnnnnnnnnnnnnnnnnnnnnnnnnnnnnnnnnnnnnnnnnnnnnnnnnnnnnnnnnnnnnnnnnnnnnnnnnnnnnnnnnnnnnnnnnnnnnnnnnnnnnnnnnnnnnnnnnnnnnnnnnnnnnnnnnnnnnnnnnnnnnnnnnnnnnnnnnnnnnnnnnnnnnnnnnnnnnnnnnnnnnnnnnnnnnnnnnnnnnnnnnnnnnnnnnnnnnnnnnnnnnnnnnnnnnnnnnnnnnnnnnnnnnnnnnnnnnnnnnnnnnnnnnnnnnnnnnnnnnnnnnnnnnnnnnnnnnnnnnnnnnnnnnnnnnnnnnnnnnnnnnnnnnnnnnnnnnnnnnnnnnnnnnnnnnnnnnnnnnnnnnnnnnnnnnnnnnnnnnnnnnnnnnnnnnnnnnnnnnnnnnnnnnnnnnnnnnnnnnnnnnnnnnnnnnnnnnnnnnnnnnnnnnnnnnnnnnnnnnnnnnnnnnnnnnnnnnnnnnnnnnnnnnnnnnnnnnnnnnnnnnnnnnnnnnnnnnnnnnnnnnnnnnnnnnnnnnnnnnnnnnnnnnnnnnnnnnnnnnnnnnnnnnnnnnnnnnnnnnnnnnnnnnnnnnnnnnnnnnnnnnnnnnnnnnnnnnnnnnnnnnnnnnnnnnnnnnnnnnnnnnnnnnnnnnnnnnnnnnnnnnnnnnnnnnnnnnnnnnnnnnnnnnnnnnnnnnnnnnnnnnnnnnnnnnnnnnnnnnnnnnnnnnnnnnnnnnnnnnnnnnnnnnnnnnnnnnnnnnnnnnnnnnnnnnnnnnnnnnnnnnnnnnnnnnnnnnnnnnnnnnnnnnnnnnnnnnnnnnnnnnnnnnnnnnnnnnnnnnnnnnnnnnnnnnnnnnnnnnnnnnnnnnnnnnnnnnnnnnnnnnnnnnnnnnnnnnnnnnnnnnnnnnnnnnnnnnnnnnnnnnnnnnnnnnnnnnnnnnnnnnnnnnnnnnnnnnnnnnnnnnnnnnnnnnnnnnnnnnnnnnnnnnnnnnnnnnnnnnnnnnnnnnnnnnnnnnnnnnnnnnnnnnnnnnnnnnnnnnnnnnnnnnnnnnnnnnnnnnnnnnnnnnnnnnnnnnnnnnnnnnnnnnnnnnnnnnnnnnnnnnnnnnnnnnnnnnnnnnnnnnnnnnnnnnnnnnnnnnnnnnnnnnnnnnnnnnnnnnnnnnnnnnnnnnnnnnnnnnnnnnnnnnnnnnnnnnnnnnnnnnnnnnnnnnnnnnnnnnnnnnnnnnnnnnnnnnnnnnnnnnnnnnnnnnnnnnnnnnnnnnnnnnnnnnnnnnnnnnnnnnnnnnnnnnnnnnnnnnnnnnnnnnnnnnnnnnnnnnnnnnnnnnnnnnnnnnnnnnnnnnnnnnnnnnnnnnnnnnnnnnnnnnnnnnnnnnnnnnnnnnnnnnnnnnnnnnnnnnnnnnnnnnnnnnnnnnnnnnnnnnnnnnnnnnnnnnnnnnnnnnnnnnnnnnnnnnnnnnnnnnnnnnnnnnnnnnnnnnnnnnnnnnnnnnnnnnnnnnnnnnnnnnnnnnnnnnnnnnnnnnnnnnnnnnnnnnnnnnnnnnnnnnnnnnnnnnnnnnnnnnnnnnnnnnnnnnnnnnnnnnnnnnnnnnnnnnnnnnnnnnnnnnnnnnnnnnnnnnnnnnnnnnnnnnnnnnnnnnnnnnnnnnnnnnnnnnnnnnnnnnnnnnnnnnnnnnnnnnnnnnnnnnnnnnnnnnnnnnnnnnnnnnnnnnnnnnnnnnnnnnnnnnnnnnnnnnnnnnnnnnnnnnnnnnnnnnnnnnnnnnnnnnnnnnnnnnnnnnnnnnnnnnnnnnnnnnnnnnnnnnnnnnnnnnnnnnnnnnnnnnnnnnnnnnnnnnnnnnnnnnnnnnnnnnnnnnnnnnnnnnnnnnnnnnnnnnnnnnnnnnnnnnnnnnnnnnnnnnnnnnnnnnnnnnnnnnnnnnnnnnnnnnnnnnnnnnnnnnnnnnnnnnnnnnnnnnnnnnnnnnnnnnnnnnnnnnnnnnnnnnnnnnnnnnnnnnnnnnnnnnnnnnnnnnnnnnnnnnnnnnnnnnnnnnnnnnnnnnnnnnnnnnnnnnnnnnnnnnnnnnnnnnnnnnnnnnnnnnnnnnnnnnnnnnnnnnnnnnnnnnnnnnnnnnnnnnnnnnnnnnnnnnnnnnnnnnnnnnnnnnnnnnnnnnnnnnnnnnnnnnnnnnnnnnnnnnnnnnnnnnnnnnnnnnnnnnnnnnnnnnnnnnnnnnnnnnnnnnnnnnnnnnnnnnnnnnnnnnnnnnnnnnnnnnnnnnnnnnnnnnnnnnnnnnnnnnnnnnnnnnnnnnnnnnnnnnnnnnnnnnnnnnnnnnnnnnnnnnnnnnnnnnnnnnnnnnnnnnnnnnnnnnnnnnnnnnnnnnnnnnnnnnnnnnnnnnnnnnnnnnnnnnnnnnnnnnnnnnnnnnnnnnnnnnnnnnnnnnnnnnnnnnnnnnnnnnnnnnnnnnnnnnnnnnnnnnnnnnnnnnnnnnnnnnnnnnnnnnnnnnnnnnnnnnnnnnnnnnnnnnnnnnnnnnnnnnnnnnnnnnnnnnnnnnnnnnnnnnnnnnnnnnnnnnnnnnnnnnnnnnnnnnnnnnnnnnnnnnnnnnnnnnnnnnnnnnnnnnnnnnnnnnnnnnnnnnnnnnnnnnnnnnnnnnnnnnnnnnnnnnnnnnnnnnnnnnnnnnnnnnnnnnnnnnnnnnnnnnnnnnnnnnnnnnnnnnnnnnnnnnnnnnnnnnnnnnnnnnnnnnnnnnnnnnnnnnnnnnnnnnnnnnnnnnnnnnnnnnnnnnnnnnnnnnnnnnnnnnnnnnnnnnnnnnnnnnnnnnnnnnnnnnnnnnnnnnnnnnnnnnnnnnnnnnnnnnnnnnnnnnnnnnnnnnnnnnnnnnnnnnnnnnnnnnnnnnnnnnnnnnnnnnnnnnnnnnnnnnnnnnnnnnnnnnnnnnnnnnnnnnnnnnnnnnnnnnnnnnnnnnnnnnnnnnnnnnnnnnnnnnnnnnnnnnnnnnnnnnnnnnnnnnnnnnnnnnnnnnnnnnnnnnnnnnnnnnnnnnnnnnnnnnnnnnnnnnnnnnnnnnnnnnnnnnnnnnnnnnnnnnnnnnnnnnnnnnnnnnnnnnnnnnnnnnnnnnnnnnnnnnnnnnnnnnnnnnnnnnnnnnnnnnnnnnnnnnnnnnnnnnnnnnnnnnnnnnnnnnnnnnnnnnnnnnnnnnnnnnnnnnnnnnnnnnnnnnnnnnnnnnnnnnnnnnnnnnnnnnnnnnnnnnnnnnnnnnnnnnnnnnnnnnnnnnnnnnnnnnnnnnnnnnnnnnnnnnnnnnnnnnnnnnnnnnnnnnnnnnnnnnnnnnnnnnnnnnnnnnnnnnnnnnnnnnnnnnnnnnnnnnnnnnnnnnnnnnnnnnnnnnnnnnnnnnnnnnnnnnnnnnnnnnnnnnnnnnnnnnnnnnnnnnnnnnnnnnnnnnnnnnnnnnnnnnnnnnnnnnnnnnnnnnnnnnnnnnnnnnnnnnnnnnnnnnnnnnnnnnnnnnnnnnnnnnnnnnnnnnnnnnnnnnnnnnnnnnnnnnnnnnnnnnnnnnnnnnnnnnnnnnnnnnnnnnnnnnnnnnnnnnnnnnnnnnnnnnnnnnnnnnnnnnnnnnnnnnnnnnnnnnnnnnnnnnnnnnnnnnnnnnnnnnnnnnnnnnnnnnnnnnnnnnnnnnnnnnnnnnnnnnnnnnnnnnnnnnnnnnnnnnnnnnnnnnnnnnnnnnnnnnnnnnnnnnnnnnnnnnnnnnnnnnnnnnnnnnnnnnnnnnnnnnnnnnnnnnnnnnnnnnnnnnnnnnnnnnnnnnnnnnnnnnnnnnnnnnnnnnnnnnnnnnnnnnnnnnnnnnnnnnnnnnnnnnnnnnnnnnnnnnnnnnnnnnnnnnnnnnnnnnnnnnnnnnnnnnnnnnnnnnnnnnnnnnnnnnnnnnnnnnnnnnnnnnnnnnnnnnnnnnnnnnnnnnnnnnnnnnnnnnnnnnnnnnnnnnnnnnnnnnnnnnnnnnnnnnnnnnnnnnnnnnnnnnnnnnnnnnnnnnnnnnnnnnnnnnnnnnnnnnnnnnnnnnnnnnnnnnnnnnnnnnnnnnnnnnnnnnnnnnnnnnnnnnnnnnnnnnnnnnnnnnnnnnnnnnnnnnnnnnnnnnnnnnnnnnnnnnnnnnnnnnnnnnnnnnnnnnnnnnnnnnnnnnnnnnnnnnnnnnnnnnnnnnnnnnnnnnnnnnnnnnnnnnnnnnnnnnnnnnnnnnnnnnnnnnnnnnnnnnnnnnnnnnnnnnnnnnnnnnnnnnnnnnnnnnnnnnnnnnnnnnnnnnnnnnnnnnnnnnnnnnnnnnnnnnnnnnnnnnnnnnnnnnnnnnnnnnnnnnnnnnnnnnnnnnnnnnnnnnnnnnnnnnnnnnnnnnnnnnnnnnnnnnnnnnnnnnnnnnnnnnnnnnnnnnnnnnnnnnnnnnnnnnnnnnnnnnnnnnnnnnnnnnnnnnnnnnnnnnnnnnnnnnnnnnnnnnnnnnnnnnnnnnnnnnnnnnnnnnnnnnnnnnnnnnnnnnnnnnnnnnnnnnnnnnnnnnnnnnnnnnnnnnnnnnnnnnnnnnnnnnnnnnnnnnnnnnnnnnnnnnnnnnnnnnnnnnnnnnnnnnnnnnnnnnnnnnnnnnnnnnnnnnnnnnnnnnnnnnnnnnnnnnnnnnnnnnnnnnnnnnnnnnnnnnnnnnnnnnnnnnnnnnnnnnnnnnnnnnnnnnnnnnnnnnnnnnnnnnnnnnnnnnnnnnnnnnnnnnnnnnnnnnnnnnnnnnnnnnnnnnnnnnnnnnnnnnnnnnnnnnnnnnnnnnnnnnnnnnnnnnnnnnnnnnnnnnnnnnnnnnnnnnnnnnnnnnnnnnnnnnnnnnnnnnnnnnnnnnnnnnnnnnnnnnnnnnnnnnnnnnnnnnnnnnnnnnnnnnnnnnnnnnnnnnnnnnnnnnnnnnnnnnnnnnnnnnnnnnnnnnnnnnnnnnnnnnnnnnnnnnnnnnnnnnnnnnnnnnnnnnnnnnnnnnnnnnnnnnnnnnnnnnnnnnnnnnnnnnnnnnnnnnnnnnnnnnnnnnnnnnnnnnnnnnnnnnnnnnnnnnnnnnnnnnnnnnnnnnnnnnnnnnnnnnnnnnnnnnnnnnnnnnnnnnnnnnnnnnnnnnnnnnnnnnnnnnnnnnnnnnnnnnnnnnnnnnnnnnnnnnnnnnnnnnnnnnnnnnnnnnnnnnnnnnnnnnnnnnnnnnnnnnnnnnnnnnnnnnnnnnnnnnnnnnnnnnnnnnnnnnnnnnnnnnnnnnnnnnnnnnnnnnnnnnnnnnnnnnnnnnnnnnnnnnnnnnnnnnnnnnnnnnnnnnnnnnnnnnnnnnnnnnnnnnnnnnnnnnnnnnnnnnnnnnnnnnnnnnnnnnnnnnnnnnnnnnnnnnnnnnnnnnnnnnnnnnnnnnnnnnnnnnnnnnnnnnnnnnnnnnnnnnnnnnnnnnnnnnnnnnnnnnnnnnnnnnnnnnnnnnnnnnnnnnnnnnnnnnnnnnnnnnnnnnnnnnnnnnnnnnnnnnnnnnnnnnnnnnnnnnnnnnnnnnnnnnnnnnnnnnnnnnnnnnnnnnnnnnnnnnnnnnnnnnnnnnnnnnnnnnnnnnnnnnnnnnnnnnnnnnnnnnnnnnnnnnnnnnnnnnnnnnnnnnnnnnnnnnnnnnnnnnnnnnnnnnnnnnnnnnnnnnnnnnnnnnnnnnnnnnnnnnnnnnnnnnnnnnnnnnnnnnnnnnnnnnnnnnnnnnnnnnnnnnnnnnnnnnnnnnnnnnnnnnnnnnnnnnnnnnnnnnnnnnnnnnnnnnnnnnnnnnnnnnnnnnnnnnnnnnnnnnnnnnnnnnnnnnnnnnnnnnnnnnnnnnnnnnnnnnnnnnnnnnnnnnnnnnnnnnnnnnnnnnnnnnnnnnnnnnnnnnnnnnnnnnnnnnnnnnnnnnnnnnnnnnnnnnnnnnnnnnnnnnnnnnnnnnnnnnnnnnnnnnnnnnnnnnnnnnnnnnnnnnnnnnnnnnnnnnnnnnnnnnnnnnnnnnnnnnnnnnnnnnnnnnnnnnnnnnnnnnnnnnnnnnnnnnnnnnnnnnnnnnnnnnnnnnnnnnnnnnnnnnnnnnnnnnnnnnnnnnnnnnnnnnnnnnnnnnnnnnnnnnnnnnnnnnnnnnnnnnnnnnnnnnnnnnnnnnnnnnnnnnnnnnnnnnnnnnnnnnnnnnnnnnnnnnnnnnnnnnnnnnnnnnnnnnnnnnnnnnnnnnnnnnnnnnnnnnnnnnnnnnnnnnnnnnnnnnnnnnnnnnnnnnnnnnnnnnnnnnnnnnnnnnnnnnnnnnnnnnnnnnnnnnnnnnnnnnnnnnnnnnnnnnnnnnnnnnnnnnnnnnnnnnnnnnnnnnnnnnnnnnnnnnnnnnnnnnnnnnnnnnnnnnnnnnnnnnnnnnnnnnnnnnnnnnnnnnnnnnnnnnnnnnnnnnnnnnnnnnnnnnnnnnnnnnnnnnnnnnnnnnnnnnnnnnnnnnnnnnnnnnnnnnnnnnnnnnnnnnnnnnnnnnnnnnnnnnnnnnnnnnnnnnnnnnnnnnnnnnnnnnnnnnnnnnnnnnnnnnnnnnnnnnnnnnnnnnnnnnnnnnnnnnnnnnnnnnnnnnnnnnnnnnnnnnnnnnnnnnnnnnnnnnnnnnnnnnnnnnnnnnnnnnnnnnnnnnnnnnnnnnnnnnnnnnnnnnnnnnnnnnnnnnnnnnnnnnnnnnnnnnnnnnnnnnnnnnnnnnnnnnnnnnnnnnnnnnnnnnnnnnnnnnnnnnnnnnnnnnnnnnnnnnnnnnnnnnnnnnnnnnnnnnnnnnnnnnnnnnnnnnnnnnnnnnnnnnnnnnnnnnnnnnnnnnnnnnnnnnnnnnnnnnnnnnnnnnnnnnnnnnnnnnnnnnnnnnnnnnnnnnnnnnnnnnnnnnnnnnnnnnnnnnnnnnnnnnnnnnnnnnnnnnnnnnnnnnnnnnnnnnnnnnnnnnnnnnnnnnnnnnnnnnnnnnnnnnnnnnnnnnnnnnnnnnnnnnnnnnnnnnnnnnnnnnnnnnnnnnnnnnnnnnnnnnnnnnnnnnnnnnnnnnnnnnnnnnnnnnnnnnnnnnnnnnnnnnnnnnnnnnnnnnnnnnnnnnnnnnnnnnnnnnnnnnnnnnnnnnnnnnnnnnnnnnnnnnnnnnnnnnnnnnnnnnnnnnnnnnnnnnnnnnnnnnnnnnnnnnnnnnnnnnnnnnnnnnnnnnnnnnnnnnnnnnnnnnnnnnnnnnnnnnnnnnnnnnnnnnnnnnnnnnnnnnnnnnnnnnnnnnnnnnnnnnnnnnnnnnnnnnnnnnnnnnnnnnnnnnnnnnnnnnnnnnnnnnnnnnnnnnnnnnnnnnnnnnnnnnnnnnnnnnnnnnnnnnnnnnnnnnnnnnnnnnnnnnnnnnnnnnnnnnnnnnnnnnnnnnnnnnnnnnnnnnnnnnnnnnnnnnnnnnnnnnnnnnnnnnnnnnnnnnnnnnnnnnnnnnnnnnnnnnnnnnnnnnnnnnnnnnnnnnnnnnnnnnnnnnnnnnnnnnnnnnnnnnnnnnnnnnnnnnnnnnnnnnnnnnnnnnnnnnnnnnnnnnnnnnnnnnnnnnnnnnnnnnnnnnnnnnnnnnnnnnnnnnnnnnnnnnnnnnnnnnnnnnnnnnnnnnnnnnnnnnnnnnnnnnnnnnnnnnnnnnnnnnnnnnnnnnnnnnnnnnnnnnnnnnnnnnnnnnnnnnnnnnnnnnnnnnnnnnnnnnnnnnnnnnnnnnnnnnnnnnnnnnnnnnnnnnnnnnnnnnnnnnnnnnnnnnnnnnnnnnnnnnnnnnnnnnnnnnnnnnnnnnnnnnnnnnnnnnnnnnnnnnnnnnnnnnnnnnnnnnnnnnnnnnnnnnnnnnnnnnnnnnnnnnnnnnnnnnnnnnnnnnnnnnnnnnnnnnnnnnnnnnnnnnnnnnnnnnnnnnnnnnnnnnnnnnnnnnnnnnnnnnnnnnnnnnnnnnnnnnnnnnnnnnnnnnnnnnnnnnnnnnnnnnnnnnnnnnnnnnnnnnnnnnnnnnnnnnnnnnnnnnnnnnnnnnnnnnnnnnnnnnnnnnnnnnnnnnnnnnnnnnnnnnnnnnnnnnnnnnnnnnnnnnnnnnnnnnnnnnnnnnnnnnnnnnnnnnnnnnnnnnnnnnnnnnnnnnnnnnnnnnnnnnnnnnnnnnnnnnnnnnnnnnnnnnnnnnnnnnnnnnnnnnnnnnnnnnnnnnnnnnnnnnnnnnnnnnnnnnnnnnnnnnnnnnnnnnnnnnnnnnnnnnnnnnnnnnnnnnnnnnnnnnnnnnnnnnnnnnnnnnnnnnnnnnnnnnnnnnnnnnnnnnnnnnnnnnnnnnnnnnnnnnnnnnnnnnnnnnnnnnnnnnnnnnnnnnnnnnnnnnnnnnnnnnnnnnnnnnnnnnnnnnnnnnnnnnnnnnnnnnnnnnnnnnnnnnnnnnnnnnnnnnnnnnnnnnnnnnnnnnnnnnnnnnnnnnnnnnnnnnnnnnnnnnnnnnnnnnnnnnnnnnnnnnnnnnnnnnnnnnnnnnnnnnnnnnnnnnnnnnnnnnnnnnnnnnnnnnnnnnnnnnnnnnnnnnnnnnnnnnnnnnnnnnnnnnnnnnnnnnnnnnnnnnnnnnnnnnnnnnnnnnnnnnnnnnnnnnnnnnnnnnnnnnnnnnnnnnnnnnnnnnnnnnnnnnnnnnnnnnnnnnnnnnnnnnnnnnnnnnnnnnnnnnnnnnnnnnnnnnnnnnnnnnnnnnnnnnnnnnnnnnnnnnnnnnnnnnnnnnnnnnnnnnnnnnnnnnnnnnnnnnnnnnnnnnnnnnnnnnnnnnnnnnnnnnnnnnnnnnnnnnnnnnnnnnnnnnnnnnnnnnnnnnnnnnnnnnnnnnnnnnnnnnnnnnnnnnnnnnnnnnnnnnnnnnnnnnnnnnnnnnnnnnnnnnnnnnnnnnnnnnnnnnnnnnnnnnnnnnnnnnnnnnnnnnnnnnnnnnnnnnnnnnnnnnnnnnnnnnnnnnnnnnnnnnnnnnnnnnnnnnnnnnnnnnnnnnnnnnnnnnnnnnnnnnnnnnnnnnnnnnnnnnnnnnnnnnnnnnnnnnnnnnnnnnnnnnnnnnnnnnnnnnnnnnnnnnnnnnnnnnnnnnnnnnnnnnnnnnnnnnnnnnnnnnnnnnnnnnnnnnnnnnnnnnnnnnnnnnnnnnnnnnnnnnnnnnnnnnnnnnnnnnnnnnnnnnnnnnnnnnnnnnnnnnnnnnnnnnnnnnnnnnnnnnnnnnnnnnnnnnnnnnnnnnnnnnnnnnnnnnnnnnnnnnnnnnnnnnnnnnnnnnnnnnnnnnnnnnnnnnnnnnnnnnnnnnnnnnnnnnnnnnnnnnnnnnnnnnnnnnnnnnnnnnnnnnnnnnnnnnnnnnnnnnnnnnnnnnnnnnnnnnnnnnnnnnnnnnnnnnnnnnnnnnnnnnnnnnnnnnnnnnnnnnnnnnnnnnnnnnnnnnnnnnnnnnnnnnnnnnnnnnnnnnnnnnnnnnnnnnnnnnnnnnnnnnnnnnnnnnnnnnnnnnnnnnnnnnnnnnnnnnnnnnnnnnnnnnnnnnnnnnnnnnnnnnnnnnnnnnnnnnnnnnnnnnnnnnnnnnnnnnnnnnnnnnnnnnnnnnnnnnnnnnnnnnnnnnnnnnnnnnnnnnnnnnnnnnnnnnnnnnnnnnnnnnnnnnnnnnnnnnnnnnnnnnnnnnnnnnnnnnnnnnnnnnnnnnnnnnnnnnnnnnnnnnnnnnnnnnnnnnnnnnnnnnnnnnnnnnnnnnnnnnnnnnnnnnnnnnnnnnnnnnnnnnnnnnnnnnnnnnnnnnnnnnnnnnnnnnnnnnnnnnnnnnnnnnnnnnnnnnnnnnnnnnnnnnnnnnnnnnnnnnnnnnnnnnnnnnnnnnnnnnnnnnnnnnnnnnnnnnnnnnnnnnnnnnnnnnnnnnnnnnnnnnnnnnnnnnnnnnnnnnnnnnnnnnnnnnnnnnnnnnnnnnnnnnnnnnnnnnnnnnnnnnnnnnnnnnnnnnnnnnnnnnnnnnnnnnnnnnnnnnnnnnnnnnnnnnnnnnnnnnnnnnnnnnnnnnnnnnnnnnnnnnnnnnnnnnnnnnnnnnnnnnnnnnnnnnnnnnnnnnnnnnnnnnnnnnnnnnnnnnnnnnnnnnnnnnnnnnnnnnnnnnnnnnnnnnnnnnnnnnnnnnnnnnnnnnnnnnnnnnnnnnnnnnnnnnnnnnnnnnnnnnnnnnnnnnnnnnnnnnnnnnnnnnnnnnnnnnnnnnnnnnnnnnnnnnnnnnnnnnnnnnnnnnnnnnnnnnnnnnnnnnnnnnnnnnnnnnnnnnnnnnnnnnnnnnnnnnnnnnnnnnnnnnnnnnnnnnnnnnnnnnnnnnnnnnnnnnnnnnnnnnnnnnnnnnnnnnnnnnnnnnnnnnnnnnnnnnnnnnnnnnnnnnnnnnnnnnnnnnnnnnnnnnnnnnnnnnnnnnnnnnnnnnnnnnnnnnnnnnnnnnnnnnnnnnnnnnnnnnnnnnnnnnnnnnnnnnnnnnnnnnnnnnnnnnnnnnnnnnnnnnnnnnnnnnnnnnnnnnnnnnnnnnnnnnnnnnnnnnnnnnnnnnnnnnnnnnnnnnnnnnnnnnnnnnnnnnnnnnnnnnnnnnnnnnnnnnnnnnnnnnnnnnnnnnnnnnnnnnnnnnnnnnnnnnnnnnnnnnnnnnnnnnnnnnnnnnnnnnnnnnnnnnnnnnnnnnnnnnnnnnnnnnnnnnnnnnnnnnnnnnnnnnnnnnnnnnnnnnnnnnnnnnnnnnnnnnnnnnnnnnnnnnnnnnnnnnnnnnnnnnnnnnnnnnnnnnnnnnnnnnnnnnnnnnnnnnnnnnnnnnnnnnnnnnnnnnnnnnnnnnnnnnnnnnnnnnnnnnnnnnnnnnnnnnnnnnnnnnnnnnnnnnnnnnnnnnnnnnnnnnnnnnnnnnnnnnnnnnnnnnnnnnnnnnnnnnnnnnnnnnnnnnnnnnnnnnnnnnnnnnnnnnnnnnnnnnnnnnnnnnnnnnnnnnnnnnnnnnnnnnnnnnnnnnnnnnnnnnnnnnnnnnnnnnnnnnnnnnnnnnnnnnnnnnnnnnnnnnnnnnnnnnnnnnnnnnnnnnnnnnnnnnnnnnnnnnnnnnnnnnnnnnnnnnnnnnnnnnnnnnnnnnnnnnnnnnnnnnnnnnnnnnnnnnnnnnnnnnnnnnnnnnnnnnnnnnnnnnnnnnnnnnnnnnnnnnnnnnnnnnnnnnnnnnnnnnnnnnnnnnnnnnnnnnnnnnnnnnnnnnnnnnnnnnnnnnnnnnnnnnnnnnnnnnnnnnnnnnnnnnnnnnnnnnnnnnnnnnnnnnnnnnnnnnnnnnnnnnnnnnnnnnnnnnnnnnnnnnnnnnnnnnnnnnnnnnnnnnnnnnnnnnnnnnnnnnnnnnnnnnnnnnnnnnnnnnnnnnnnnnnnnnnnnnnnnnnnnnnnnnnnnnnnnnnnnnnnnnnnnnnnnnnnnnnnnnnnnnnnnnnnnnnnnnnnnnnnnnnnnnnnnnnnnnnnnnnnnnnnnnnnnnnnnnnnnnnnnnnnnnnnnnnnnnnnnnnnnnnnnnnnnnnnnnnnnnnnnnnnnnnnnnnnnnnnnnnnnnnnnnnnnnnnnnnnnnnnnnnnnnnnnnnnnnnnnnnnnnnnnnnnnnnnnnnnnnnnnnnnnnnnnnnnnnnnnnnnnnnnnnnnnnnnnnnnnnnnnnnnnnnnnnnnnnnnnnnnnnnnnnnnnnnnnnnnnnnnnnnnnnnnnnnnnnnnnnnnnnnnnnnnnnnnnnnnnnnnnnnnnnnnnnnnnnnnnnnnnnnnnnnnnnnnnnnnnnnnnnnnnnnnnnnnnnnnnnnnnnnnnnnnnnnnnnnnnnnnnnnnnnnnnnnnnnnnnnnnnnnnnnnnnnnnnnnnnnnnnnnnnnnnnnnnnnnnnnnnnnnnnnnnnnnnnnnnnnnnnnnnnnnnnnnnnnnnnnnnnnnnnnnnnnnnnnnnnnnnnnnnnnnnnnnnnnnnnnnnnnnnnnnnnnnnnnnnnnnnnnnnnnnnnnnnnnnnnnnnnnnnnnnnnnnnnnnnnnnnnnnnnnnnnnnnnnnnnnnnnnnnnnnnnnnnnnnnnnnnnnnnnnnnnnnnnnnnnnnnnnnnnnnnnnnnnnnnnnnnnnnnnnnnnnnnnnnnnnnnnnnnnnnnnnnnnnnnnnnnnnnnnnnnnnnnnnnnnnnnnnnnnnnnnnnnnnnnnnnnnnnnnnnnnnnnnnnnnnnnnnnnnnnnnnnnnnnnnnnnnnnnnnnnnnnnnnnnnnnnnnnnnnnnnnnnnnnnnnnnnnnnnnnnnnnnnnnnnnnnnnnnnnnnnnnnnnnnnnnnnnnnnnnnnnnnnnnnnnnnnnnnnnnnnnnnnnnnnnnnnnnnnnnnnnnnnnnnnnnnnnnnnnnnnnnnnnnnnnnnnnnnnnnnnnnnnnnnnnnnnnnnnnnnnnnnnnnnnnnnnnnnnnnnnnnnnnnnnnnnnnnnnnnnnnnnnnnnnnnnnnnnnnnnnnnnnnnnnnnnnnnnnnnnnnnnnnnnnnnnnnnnnnnnnnnnnnnnnnnnnnnnnnnnnnnnnnnnnnnnnnnnnnnnnnnnnnnnnnnnnnnnnnnnnnnnnnnnnnnnnnnnnnnnnnnnnnnnnnnnnnnnnnnnnnnnnnnnnnnnnnnnnnnnnnnnnnnnnnnnnnnnnnnnnnnnnnnnnnnnnnnnnnnnnnnnnnnnnnnnnnnnnnnnnnnnnnnnnnnnnnnnnnnnnnnnnnnnnnnnnnnnnnnnnnnnnnnnnnnnnnnnnnnnnnnnnnnnnnnnnnnnnnnnnnnnnnnnnnnnnnnnnnnnnnnnnnnnnnnnnnnnnnnnnnnnnnnnnnnnnnnnnnnnnnnnnnnnnnnnnnnnnnnnnnnnnnnnnnnnnnnnnnnnnnnnnnnnnnnnnnnnnnnnnnnnnnnnnnnnnnnnnnnnnnnnnnnnnnnnnnnnnnnnnnnnnnnnnnnnnnnnnnnnnnnnnnnnnnnnnnnnnnnnnnnnnnnnnnnnnnnnnnnnnnnnnnnnnnnnnnnnnnnnnnnnnnnnnnnnnnnnnnnnnnnnnnnnnnnnnnnnnnnnnnnnnnnnnnnnnnnnnnnnnnnnnnnnnnnnnnnnnnnnnnnnnnnnnnnnnnnnnnnnnnnnnnnnnnnnnnnnnnnnnnnnnnnnnnnnnnnnnnnnnnnnnnnnnnnnnnnnnnnnnnnnnnnnnnnnnnnnnnnnnnnnnnnnnnnnnnnnnnnnnnnnnnnnnnnnnnnnnnnnnnnnnnnnnnnnnnnnnnnnnnnnnnnnnnnnnnnnnnnnnnnnnnnnnnnnnnnnnnnnnnnnnnnnnnnnnnnnnnnnnnnnnnnnnnnnnnnnnnnnnnnnnnnnnnnnnnnnnnnnnnnnnnnnnnnnnnnnnnnnnnnnnnnnnnnnnnnnnnnnnnnnnnnnnnnnnnnnnnnnnnnnnnnnnnnnnnnnnnnnnnnnnnnnnnnnnnnnnnnnnnnnnnnnnnnnnnnnnnnnnnnnnnnnnnnnnnnnnnnnnnnnnnnnnnnnnnnnnnnnnnnnnnnnnnnnnnnnnnnnnnnnnnnnnnnnnnnnnnnnnnnnnnnnnnnnnnnnnnnnnnnnnnnnnnnnnnnnnnnnnnnnnnnnnnnnnnnnnnnnnnnnnnnnnnnnnnnnnnnnnnnnnnnnnnnnnnnnnnnnnnnnnnnnnnnnnnnnnnnnnnnnnnnnnnnnnnnnnnnnnnnnnnnnnnnnnnnnnnnnnnnnnnnnnnnnnnnnnnnnnnnnnnnnnnnnnnnnnnnnnnnnnnnnnnnnnnnnnnnnnnnnnnnnnnnnnnnnnnnnnnnnnnnnnnnnnnnnnnnnnnnnnnnnnnnnnnnnnnnnnnnnnnnnnnnnnnnnnnnnnnnnnnnnnnnnnnnnnnnnnnnnnnnnnnnnnnnnnnnnnnnnnnnnnnnnnnnnnnnnnnnnnnnnnnnnnnnnnnnnnnnnnnnnnnnnnnnnnnnnnnnnnnnnnnnnnnnnnnnnnnnnnnnnnnnnnnnnnnnnnnnnnnnnnnnnnnnnnnnnnnnnnnnnnnnnnnnnnnnnnnnnnnnnnnnnnnnnnnnnnnnnnnnnnnnnnnnnnnnnnnnnnnnnnnnnnnnnnnnnnnnnnnnnnnnnnnnnnnnnnnnnnnnnnnnnnnnnnnnnnnnnnnnnnnnnnnnnnnnnnnnnnnnnnnnnnnnnnnnnnnnnnnnnnnnnnnnnnnnnnnnnnnnnnnnnnnnnnnnnnnnnnnnnnnnnnnnnnnnnnnnnnnnnnnnnnnnnnnnnnnnnnnnnnnnnnnnnnnnnnnnnnnnnnnnnnnnnnnnnnnnnnnnnnnnnnnnnnnnnnnnnnnnnnnnnnnnnnnnnnnnnnnnnnnnnnnnnnnnnnnnnnnnnnnnnnnnnnnnnnnnnnnnnnnnnnnnnnnnnnnnnnnnnnnnnnnnnnnnnnnnnnnnnnnnnnnnnnnnnnnnnnnnnnnnnnnnnnnnnnnnnnnnnnnnnnnnnnnnnnnnnnnnnnnnnnnnnnnnnnnnnnnnnnnnnnnnnnnnnnnnnnnnnnnnnnnnnnnnnnnnnnnnnnnnnnnnnnnnnnnnnnnnnnnnnnnnnnnnnnnnnnnnnnnnnnnnnnnnnnnnnnnnnnnnnnnnnnnnnnnnnnnnnnnnnnnnnnnnnnnnnnnnnnnnnnnnnnnnnnnnnnnnnnnnnnnnnnnnnnnnnnnnnnnnnnnnnnnnnnnnnnnnnnnnnnnnnnnnnnnnnnnnnnnnnnnnnnnnnnnnnnnnnnnnnnnnnnnnnnnnnnnnnnnnnnnnnnnnnnnnnnnnnnnnnnnnnnnnnnnnnnnnnnnnnnnnnnnnnnnnnnnnnnnnnnnnnnnnnnnnnnnnnnnnnnnnnnnnnnnnnnnnnnnnnnnnnnnnnnnnnnnnnnnnnnnnnnnnnnnnnnnnnnnnnnnnnnnnnnnnnnnnnnnnnnnnnnnnnnnnnnnnnnnnnnnnnnnnnnnnnnnnnnnnnnnnnnnnnnnnnnnnnnnnnnnnnnnnnnnnnnnnnnnnnnnnnnnnnnnnnnnnnnnnnnnnnnnnnnnnnnnnnnnnnnnnnnnnnnnnnnnnnnnnnnnnnnnnnnnnnnnnnnnnnnnnnnnnnnnnnnnnnnnnnnnnnnnnnnnnnnnnnnnnnnnnnnnnnnnnnnnnnnnnnnnnnnnnnnnnnnnnnnnnnnnnnnnnnnnnnnnnnnnnnnnnnnnnnnnnnnnnnnnnnnnnnnnnnnnnnnnnnnnnnnnnnnnnnnnnnnnnnnnnnnnnnnnnnnnnnnnnnnnnnnnnnnnnnnnnnnnnnnnnnnnnnnnnnnnnnnnnnnnnnnnnnnnnnnnnnnnnnnnnnnnnnnnnnnnnnnnnnnnnnnnnnnnnnnnnnnnnnnnnnnnnnnnnnnnnnnnnnnnnnnnnnnnnnnnnnnnnnnnnnnnnnnnnnnnnnnnnnnnnnnnnnnnnnnnnnnnnnnnnnnnnnnnnnnnnnnnnnnnnnnnnnnnnnnnnnnnnnnnnnnnnnnnnnnnnnnnnnnnnnnnnnnnnnnnnnnnnnnnnnnnnnnnnnnnnnnnnnnnnnnnnnnnnnnnnnnnnnnnnnnnnnnnnnnnnnnnnnnnnnnnnnnnnnnnnnnnnnnnnnnnnnnnnnnnnnnnnnnnnnnnnnnnnnnnnnnnnnnnnnnnnnnnnnnnnnnnnnnnnnnnnnnnnnnnnnnnnnnnnnnnnnnnnnnnnnnnnnnnnnnnnnnnnnnnnnnnnnnnnnnnnnnnnnnnnnnnnnnnnnnnnnnnnnnnnnnnnnnnnnnnnnnnnnnnnnnnnnnnnnnnnnnnnnnnnnnnnnnnnnnnnnnnnnnnnnnnnnnnnnnnnnnnnnnnnnnnnnnnnnnnnnnnnnnnnnnnnnnnnnnnnnnnnnnnnnnnnnnnnnnnnnnnnnnnnnnnnnnnnnnnnnnnnnnnnnnnnnnnnnnnnnnnnnnnnnnnnnnnnnnnnnnnnnnnnnnnnnnnnnnnnnnnnnnnnnnnnnnnnnnnnnnnnnnnnnnnnnnnnnnnnnnnnnnnnnnnnnnnnnnnnnnnnnnnnnnnnnnnnnnnnnnnnnnnnnnnnnnnnnnnnnnnnnnnnnnnnnnnnnnnnnnnnnnnnnnnnnnnnnnnnnnnnnnnnnnnnnnnnnnnnnnnnnnnnnnnnnnnnnnnnnnnnnnnnnnnnnnnnnnnnnnnnnnnnnnnnnnnnnnnnnnnnnnnnnnnnnnnnnnnnnnnnnnnnnnnnnnnnnnnnnnnnnnnnnnnnnnnnnnnnnnnnnnnnnnnnnnnnnnnnnnnnnnnnnnnnnnnnnnnnnnnnnnnnnnnnnnnnnnnnnnnnnnnnnnnnnnnnnnnnnnnnnnnnnnnnnnnnnnnnnnnnnnnnnnnnnnnnnnnnnnnnnnnnnnnnnnnnnnnnnnnnnnnnnnnnnnnnnnnnnnnnnnnnnnnnnnnnnnnnnnnnnnnnnnnnnnnnnnnnnnnnnnnnnnnnnnnnnnnnnnnnnnnnnnnnnnnnnnnnnnnnnnnnnnnnnnnnnnnnnnnnnnnnnnnnnnnnnnnnnnnnnnnnnnnnnnnnnnnnnnnnnnnnnnnnnnnnnnnnnnnnnnnnnnnnnnnnnnnnnnnnnnnnnnnnnnnnnnnnnnnnnnnnnnnnnnnnnnnnnnnnnnnnnnnnnnnnnnnnnnnnnnnnnnnnnnnnnnnnnnnnnnnnnnnnnnnnnnnnnnnnnnnnnnnnnnnnnnnnnnnnnnnnnnnnnnnnnnnnnnnnnnnnnnnnnnnnnnnnnnnnnnnnnnnnnnnnnnnnnnnnnnnnnnnnnnnnnnnnnnnnnnnnnnnnnnnnnnnnnnnnnnnnnnnnnnnnnnnnnnnnnnnnnnnnnnnnnnnnnnnnnnnnnnnnnnnnnnnnnnnnnnnnnnnnnnnnnnnnnnnnnnnnnnnnnnnnnnnnnnnnnnnnnnnnnnnnnnnnnnnnnnnnnnnnnnnnnnnnnnnnnnnnnnnnnnnnnnnnnnnnnnnnnnnnnnnnnnnnnnnnnnnnnnnnnnnnnnnnnnnnnnnnnnnnnnnnnnnnnnnnnnnnnnnnnnnnnnnnnnnnnnnnnnnnnnnnnnnnnnnnnnnnnnnnnnnnnnnnnnnnnnnnnnnnnnnnnnnnnnnnnnnnnnnnnnnnnnnnnnnnnnnnnnnnnnnnnnnnnnnnnnnnnnnnnnnnnnnnnnnnnnnnnnnnnnnnnnnnnnnnnnnnnnnnnnnnnnnnnnnnnnnnnnnnnnnnnnnnnnnnnnnnnnnnnnnnnnnnnnnnnnnnnnnnnnnnnnnnnnnnnnnnnnnnnnnnnnnnnnnnnnnnnnnnnnnnnnnnnnnnnnnnnnnnnnnnnnnnnnnnnnnnnnnnnnnnnnnnnnnnnnnnnnnnnnnnnnnnnnnnnnnnnnnnnnnnnnnnnnnnnnnnnnnnnnnnnnnnnnnnnnnnnnnnnnnnnnnnnnnnnnnnnnnnnnnnnnnnnnnnnnnnnnnnnnnnnnnnnnnnnnnnnnnnnnnnnnnnnnnnnnnnnnnnnnnnnnnnnnnnnnnnnnnnnnnnnnnnnnnnnnnnnnnnnnnnnnnnnnnnnnnnnnnnnnnnnnnnnnnnnnnnnnnnnnnnnnnnnnnnnnnnnnnnnnnnnnnnnnnnnnnnnnnnnnnnnnnnnnnnnnnnnnnnnnnnnnnnnnnnnnnnnnnnnnnnnnnnnnnnnnnnnnnnnnnnnnnnnnnnnnnnnnnnnnnnnnnnnnnnnnnnnnnnnnnnnnnnnnnnnnnnnnnnnnnnnnnnnnnnnnnnnnnnnnnnnnnnnnnnnnnnnnnnnnnnnnnnnnnnnnnnnnnnnnnnnnnnnnnnnnnnnnnnnnnnnnnnnnnnnnnnnnnnnnnnnnnnnnnnnnnnnnnnnnnnnnnnnnnnnnnnnnnnnnnnnnnnnnnnnnnnnnnnnnnnnnnnnnnnnnnnnnnnnnnnnnnnnnnnnnnnnnnnnnnnnnnnnnnnnnnnnnnnnnnnnnnnnnnnnnnnnnnnnnnnnnnnnnnnnnnnnnnnnnnnnnnnnnnnnnnnnnnnnnnnnnnnnnnnnnnnnnnnnnnnnnnnnnnnnnnnnnnnnnnnnnnnnnnnnnnnnnnnnnnnnnnnnnnnnnnnnnnnnnnnnnnnnnnnnnnnnnnnnnnnnnnnnnnnnnnnnnnnnnnnnnnnnnnnnnnnnnnnnnnnnnnnnnnnnnnnnnnnnnnnnnnnnnnnnnnnnnnnnnnnnnnnnnnnnnnnnnnnnnnnnnnnnnnnnnnnnnnnnnnnnnnnnnnnnnnnnnnnnnnnnnnnnnnnnnnnnnnnnnnnnnnnnnnnnnnnnnnnnnnnnnnnnnnnnnnnnnnnnnnnnnnnnnnnnnnnnnnnnnnnnnnnnnnnnnnnnnnnnnnnnnnnnnnnnnnnnnnnnnnnnnnnnnnnnnnnnnnnnnnnnnnnnnnnnnnnnnnnnnnnnnnnnnnnnnnnnnnnnnnnnnnnnnnnnnnnnnnnnnnnnnnnnnnnnnnnnnnnnnnnnnnnnnnnnnnnnnnnnnnnnnnnnnnnnnnnnnnnnnnnnnnnnnnnnnnnnnnnnnnnnnnnnnnnnnnnnnnnnnnnnnnnnnnnnnnnnnnnnnnnnnnnnnnnnnnnnnnnnnnnnnnnnnnnnnnnnnnnnnnnnnnnnnnnnnnnnnnnnnnnnnnnnnnnnnnnnnnnnnnnnnnnnnnnnnnnnnnnnnnnnnnnnnnnnnnnnnnnnnnnnnnnnnnnnnnnnnnnnnnnnnnnnnnnnnnnnnnnnnnnnnnnnnnnnnnnnnnnnnnnnnnnnnnnnnnnnnnnnnnnnnnnnnnnnnnnnnnnnnnnnnnnnnnnnnnnnnnnnnnnnnnnnnnnnnnnnnnnnnnnnnnnnnnnnnnnnnnnnnnnnnnnnnnnnnnnnnnnnnnnnnnnnnnnnnnnnnnnnnnnnnnnnnnnnnnnnnnnnnnnnnnnnnnnnnnnnnnnnnnnnnnnnnnnnnnnnnnnnnnnnnnnnnnnnnnnnnnnnnnnnnnnnnnnnnnnnnnnnnnnnnnnnnnnnnnnnnnnnnnnnnnnnnnnnnnnnnnnnnnnnnnnnnnnnnnnnnnnnnnnnnnnnnnnnnnnnnnnnnnnnnnnnnnnnnnnnnnnnnnnnnnnnnnnnnnnnnnnnnnnnnnnnnnnnnnnnnnnnnnnnnnnnnnnnnnnnnnnnnnnnnnnnnnnnnnnnnnnnnnnnnnnnnnnnnnnnnnnnnnnnnnnnnnnnnnnnnnnnnnnnnnnnnnnnnnnnnnnnnnnnnnnnnnnnnnnnnnnnnnnnnnnnnnnnnnnnnnnnnnnnnnnnnnnnnnnnnnnnnnnnnnnnnnnnnnnnnnnnnnnnnnnnnnnnnnnnnnnnnnnnnnnnnnnnnnnnnnnnnnnnnnnnnnnnnnnnnnnnnnnnnnnnnnnnnnnnnnnnnnnnnnnnnnnnnnnnnnnnnnnnnnnnnnnnnnnnnnnnnnnnnnnnnnnnnnnnnnnnnnnnnnnnnnnnnnnnnnnnnnnnnnnnnnnnnnnnnnnnnnnnnnnnnnnnnnnnnnnnnnnnnnnnnnnnnnnnnnnnnnnnnnnnnnnnnnnnnnnnnnnnnnnnnnnnnnnnnnnnnnnnnnnnnnnnnnnnnnnnnnnnnnnnnnnnnnnnnnnnnnnnnnnnnnnnnnnnnnnnnnnnnnnnnnnnnnnnnnnnnnnnnnnnnnnnnnnnnnnnnnnnnnnnnnnnnnnnnnnnnnnnnnnnnnnnnnnnnnnnnnnnnnnnnnnnnnnnnnnnnnnnnnnnnnnnnnnnnnnnnnnnnnnnnnnnnnnnnnnnnnnnnnnnnnnnnnnnnnnnnnnnnnnnnnnnnnnnnnnnnnnnnnnnnnnnnnnnnnnnnnnnnnnnnnnnnnnnnnnnnnnnnnnnnnnnnnnnnnnnnnnnnnnnnnnnnnnnnnnnnnnnnnnnnnnnnnnnnnnnnnnnnnnnnnnnnnnnnnnnnnnnnnnnnnnnnnnnnnnnnnnnnnnnnnnnnnnnnnnnnnnnnnnnnnnnnnnnnnnnnnnnnnnnnnnnnnnnnnnnnnnnnnnnnnnnnnnnnnnnnnnnnnnnnnnnnnnnnnnnnnnnnnnnnnnnnnnnnnnnnnnnnnnnnnnnnnnnnnnnnnnnnnnnnnnnnnnnnnnnnnnnnnnnnnnnnnnnnnnnnnnnnnnnnnnnnnnnnnnnnnnnnnnnnnnnnnnnnnnnnnnnnnnnnnnnnnnnnnnnnnnnnnnnnnnnnnnnnnnnnnnnnnnnnnnnnnnnnnnnnnnnnnnnnnnnnnnnnnnnnnnnnnnnnnnnnnnnnnnnnnnnnnnnnnnnnnnnnnnnnnnnnnnnnnnnnnnnnnnnnnnnnnnnnnnnnnnnnnnnnnnnnnnnnnnnnnnnnnnnnnnnnnnnnnnnnnnnnnnnnnnnnnnnnnnnnnnnnnnnnnnnnnnnnnnnnnnnnnnnnnnnnnnnnnnnnnnnnnnnnnnnnnnnnnnnnnnnnnnnnnnnnnnnnnnnnnnnnnnnnnnnnnnnnnnnnnnnnnnnnnnnnnnnnnnnnnnnnnnnnnnnnnnnnnnnnnnnnnnnnnnnnnnnnnnnnnnnnnnnnnnnnnnnnnnnnnnnnnnnnnnnnnnnnnnnnnnnnnnnnnnnnnnnnnnnnnnnnnnnnnnnnnnnnnnnnnnnnnnnnnnnnnnnnnnnnnnnnnnnnnnnnnnnnnnnnnnnnnnnnnnnnnnnnnnnnnnnnnnnnnnnnnnnnnnnnnnnnnnnnnnnnnnnnnnnnnnnnnnnnnnnnnnnnnnnnnnnnnnnnnnnnnnnnnnnnnnnnnnnnnnnnnnnnnnnnnnnnnnnnnnnnnnnnnnnnnnnnnnnnnnnnnnnnnnnnnnnnnnnnnnnnnnnnnnnnnnnnnnnnnnnnnnnnnnnnnnnnnnnnnnnnnnnnnnnnnnnnnnnnnnnnnnnnnnnnnnnnnnnnnnnnnnnnnnnnnnnnnnnnnnnnnnnnnnnnnnnnnnnnnnnnnnnnnnnnnnnnnnnnnnnnnnnnnnnnnnnnnnnnnnnnnnnnnnnnnnnnnnnnnnnnnnnnnnnnnnnnnnnnnnnnnnnnnnnnnnnnnnnnnnnnnnnnnnnnnnnnnnnnnnnnnnnnnnnnnnnnnnnnnnnnnnnnnnnnnnnnnnnnnnnnnnnnnnnnnnnnnnnnnnnnnnnnnnnnnnnnnnnnnnnnnnnnnnnnnnnnnnnnnnnnnnnnnnnnnnnnnnnnnnnnnnnnnnnnnnnnnnnnnnnnnnnnnnnnnnnnnnnnnnnnnnnnnnnnnnnnnnnnnnnnnnnnnnnnnnnnnnnnnnnnnnnnnnnnnnnnnnnnnnnnnnnnnnnnnnnnnnnnnnnnnnnnnnnnnnnnnnnnnnnnnnnnnnnnnnnnnnnnnnnnnnnnnnnnnnnnnnnnnnnnnnnnnnnnnnnnnnnnnnnnnnnnnnnnnnnnnnnnnnnnnnnnnnnnnnnnnnnnnnnnnnnnnnnnnnnnnnnnnnnnnnnnnnnnnnnnnnnnnnnnnnnnnnnnnnnnnnnnnnnnnnnnnnnnnnnnnnnnnnnnnnnnnnnnnnnnnnnnnnnnnnnnnnnnnnnnnnnnnnnnnnnnnnnnnnnnnnnnnnnnnnnnnnnnnnnnnnnnnnnnnnnnnnnnnnnnnnnnnnnnnnnnnnnnnnnnnnnnnnnnnnnnnnnnnnnnnnnnnnnnnnnnnnnnnnnnnnnnnnnnnnnnnnnnnnnnnnnnnnnnnnnnnnnnnnnnnnnnnnnnnnnnnnnnnnnnnnnnnnnnnnnnnnnnnnnnnnnnnnnnnnnnnnnnnnnnnnnnnnnnnnnnnnnnnnnnnnnnnnnnnnnnnnnnnnnnnnnnnnnnnnnnnnnnnnnnnnnnnnnnnnnnnnnnnnnnnnnnnnnnnnnnnnnnnnnnnnnnnnnnnnnnnnnnnnnnnnnnnnnnnnnnnnnnnnnnnnnnnnnnnnnnnnnnnnnnnnnnnnnnnnnnnnnnnnnnnnnnnnnnnnnnnnnnnnnnnnnnnnnnnnnnnnnnnnnnnnnnnnnnnnnnnnnnnnnnnnnnnnnnnnnnnnnnnnnnnnnnnnnnnnnnnnnnnnnnnnnnnnnnnnnnnnnnnnnnnnnnnnnnnnnnnnnnnnnnnnnnnnnnnnnnnnnnnnnnnnnnnnnnnnnnnnnnnnnnnnnnnnnnnnnnnnnnnnnnnnnnnnnnnnnnnnnnnnnnnnnnnnnnnnnnnnnnnnnnnnnnnnnnnnnnnnnnnnnnnnnnnnnnnnnnnnnnnnnnnnnnnnnnnnnnnnnnnnnnnnnnnnnnnnnnnnnnnnnnnnnnnnnnnnnnnnnnnnnnnnnnnnnnnnnnnnnnnnnnnnnnnnnnnnnnnnnnnnnnnnnnnnnnnnnnnnnnnnnnnnnnnnnnnnnnnnnnnnnnnnnnnnnnnnnnnnnnnnnnnnnnnnnnnnnnnnnnnnnnnnnnnnnnnnnnnnnnnnnnnnnnnnnnnnnnnnnnnnnnnnnnnnnnnnnnnnnnnnnnnnnnnnnnnnnnnnnnnnnnnnnnnnnnnnnnnnnnnnnnnnnnnnnnnnnnnnnnnnnnnnnnnnnnnnnnnnnnnnnnnnnnnnnnnnnnnnnnnnnnnnnnnnnnnnnnnnnnnnnnnnnnnnnnnnnnnnnnnnnnnnnnnnnnnnnnnnnnnnnnnnnnnnnnnnnnnnnnnnnnnnnnnnnnnnnnnnnnnnnnnnnnnnnnnnnnnnnnnnnnnnnnnnnnnnnnnnnnnnnnnnnnnnnnnnnnnnnnnnnnnnnnnnnnnnnnnnnnnnnnnnnnnnnnnnnnnnnnnnnnnnnnnnnnnnnnnnnnnnnnnnnnnnnnnnnnnnnnnnnnnnnnnnnnnnnnnnnnnnnnnnnnnnnnnnnnnnnnnnnnnnnnnnnnnnnnnnnnnnnnnnnnnnnnnnnnnnnnnnnnnnnnnnnnnnnnnnnnnnnnnnnnnnnnnnnnnnnnnnnnnnnnnnnnnnnnnnnnnnnnnnnnnnnnnnnnnnnnnnnnnnnnnnnnnnnnnnnnnnnnnnnnnnnnnnnnnnnnnnnnnnnnnnnnnnnnnnnnnnnnnnnnnnnnnnnnnnnnnnnnnnnnnnnnnnnnnnnnnnnnnnnnnnnnnnnnnnnnnnnnnnnnnnnnnnnnnnnnnnnnnnnnnnnnnnnnnnnnnnnnnnnnnnnnnnnnnnnnnnnnnnnnnnnnnnnnnnnnnnnnnnnnnnnnnnnnnnnnnnnnnnnnnnnnnnnnnnnnnnnnnnnnnnnnnnnnnnnnnnnnnnnnnnnnnnnnnnnnnnnnnnnnnnnnnnnnnnnnnnnnnnnnnnnnnnnnnnnnnnnnnnnnnnnnnnnnnnnnnnnnnnnnnnnnnnnnnnnnnnnnnnnnnnnnnnnnnnnnnnnnnnnnnnnnnnnnnnnnnnnnnnnnnnnnnnnnnnnnnnnnnnnnnnnnnnnnnnnnnnnnnnnnnnnnnnnnnnnnnnnnnnnnnnnnnnnnnnnnnnnnnnnnnnnnnnnnnnnnnnnnnnnnnnnnnnnnnnnnnnnnnnnnnnnnnnnnnnnnnnnnnnnnnnnnnnnnnnnnnnnnnnnnnnnnnnnnnnnnnnnnnnnnnnnnnnnnnnnnnnnnnnnnnnnnnnnnnnnnnnnnnnnnnnnnnnnnnnnnnnnnnnnnnnnnnnnnnnnnnnnnnnnnnnnnnnnnnnnnnnnnnnnnnnnnnnnnnnnnnnnnnnnnnnnnnnnnnnnnnnnnnnnnnnnnnnnnnnnnnnnnnnnnnnnnnnnnnnnnnnnnnnnnnnnnnnnnnnnnnnnnnnnnnnnnnnnnnnnnnnnnnnnnnnnnnnnnnnnnnnnnnnnnnnnnnnnnnnnnnnnnnnnnnnnnnnnnnnnnnnnnnnnnnnnnnnnnnnnnnnnnnnnnnnnnnnnnnnnnnnnnnnnnnnnnnnnnnnnnnnnnnnnnnnnnnnnnnnnnnnnnnnnnnnnnnnnnnnnnnnnnnnnnnnnnnnnnnnnnnnnnnnnnnnnnnnnnnnnnnnnnnnnnnnnnnnnnnnnnnnnnnnnnnnnnnnnnnnnnnnnnnnnnnnnnnnnnnnnnnnnnnnnnnnnnnnnnnnnnnnnnnnnnnnnnnnnnnnnnnnnnnnnnnnnnnnnnnnnnnnnnnnnnnnnnnnnnnnnnnnnnnnnnnnnnnnnnnnnnnnnnnnnnnnnnnnnnnnnnnnnnnnnnnnnnnnnnnnnnnnnnnnnnnnnnnnnnnnnnnnnnnnnnnnnnnnnnnnnnnnnnnnnnnnnnnnnnnnnnnnnnnnnnnnnnnnnnnnnnnnnnnnnnnnnnnnnnnnnnnnnnnnnnnnnnnnnnnnnnnnnnnnnnnnnnnnnnnnnnnnnnnnnnnnnnnnnnnnnnnnnnnnnnnnnnnnnnnnnnnnnnnnnnnnnnnnnnnnnnnnnnnnnnnnnnnnnnnnnnnnnnnnnnnnnnnnnnnnnnnnnnnnnnnnnnnnnnnnnnnnnnnnnnnnnnnnnnnnnnnnnnnnnnnnnnnnnnnnnnnnnnnnnnnnnnnnnnnnnnnnnnnnnnnnnnnnnnnnnnnnnnnnnnnnnnnnnnnnnnnnnnnnnnnnnnnnnnnnnnnnnnnnnnnnnnnnnnnnnnnnnnnnnnnnnnnnnnnnnnnnnnnnnnnnnnnnnnnnnnnnnnnnnnnnnnnnnnnnnnnnnnnnnnnnnnnnnnnnnnnnnnnnnnnnnnnnnnnnnnnnnnnnnnnnnnnnnnnnnnnnnnnnnnnnnnnnnnnnnnnnnnnnnnnnnnnnnnnnnnnnnnnnnnnnnnnnnnnnnnnnnnnnnnnnnnnnnnnnnnnnnnnnnnnnnnnnnnnnnnnnnnnnnnnnnnnnnnnnnnnnnnnnnnnnnnnnnnnnnnnnnnnnnnnnnnnnnnnnnnnnnnnnnnnnnnnnnnnnnnnnnnnnnnnnnnnnnnnnnnnnnnnnnnnnnnnnnnnnnnnnnnnnnnnnnnnnnnnnnnnnnnnnnnnnnnnnnnnnnnnnnnnnnnnnnnnnnnnnnnnnnnnnnnnnnnnnnnnnnnnnnnnnnnnnnnnnnnnnnnnnnnnnnnnnnnnnnnnnnnnnnnnnnnnnnnnnnnnnnnnnnnnnnnnnnnnnnnnnnnnnnnnnnnnnnnnnnnnnnnnnnnnnnnnnnnnnnnnnnnnnnnnnnnnnnnnnnnnnnnnnnnnnnnnnnnnnnnnnnnnnnnnnnnnnnnnnnnnnnnnnnnnnnnnnnnnnnnnnnnnnnnnnnnnnnnnnnnnnnnnnnnnnnnnnnnnnnnnnnnnnnnnnnnnnnnnnnnnnnnnnnnnnnnnnnnnnnnnnnnnnnnnnnnnnnnnnnnnnnnnnnnnnnnnnnnnnnnnnnnnnnnnnnnnnnnnnnnnnnnnnnnnnnnnnnnnnnnnnnnnnnnnnnnnnnnnnnnnnnnnnnnnnnnnnnnnnnnnnnnnnnnnnnnnnnnnnnnnnnnnnnnnnnnnnnnnnnnnnnnnnnnnnnnnnnnnnnnnnnnnnnnnnnnnnnnnnnnnnnnnnnnnnnnnnnnnnnnnnnnnnnnnnnnnnnnnnnnnnnnnnnnnnnnnnnnnnnnnnnnnnnnnnnnnnnnnnnnnnnnnnnnnnnnnnnnnnnnnnnnnnnnnnnnnnnnnnnnnnnnnnnnnnnnnnnnnnnnnnnnnnnnnnnnnnnnnnnnnnnnnnnnnnnnnnnnnnnnnnnnnnnnnnnnnnnnnnnnnnnnnnnnnnnnnnnnnnnnnnnnnnnnnnnnnnnnnnnnnnnnnnnnnnnnnnnnnnnnnnnnnnnnnnnnnnnnnnnnnnnnnnnnnnnnnnnnnnnnnnnnnnnnnnnnnnnnnnnnnnnnnnnnnnnnnnnnnnnnnnnnnnnnnnnnnnnnnnnnnnnnnnnnnnnnnnnnnnnnnnnnnnnnnnnnnnnnnnnnnnnnnnnnnnnnnnnnnnnnnnnnnnnnnnnnnnnnnnnnnnnnnnnnnnnnnnnnnnnnnnnnnnnnnnnnnnnnnnnnnnnnnnnnnnnnnnnnnnnnnnnnnnnnnnnnnnnnnnnnnnnnnnnnnnnnnnnnnnnnnnnnnnnnnnnnnnnnnnnnnnnnnnnnnnnnnnnnnnnnnnnnnnnnnnnnnnnnnnnnnnnnnnnnnnnnnnnnnnnnnnnnnnnnnnnnnnnnnnnnnnnnnnnnnnnnnnnnnnnnnnnnnnnnnnnnnnnnnnnnnnnnnnnnnnnnnnnnnnnnnnnnnnnnnnnnnnnnnnnnnnnnnnnnnnnnnnnnnnnnnnnnnnnnnnnnnnnnnnnnnnnnnnnnnnnnnnnnnnnnnnnnnnnnnnnnnnnnnnnnnnnnnnnnnnnnnnnnnnnnnnnnnnnnnnnnnnnnnnnnnnnnnnnnnnnnnnnnnnnnnnnnnnnnnnnnnnnnnnnnnnnnnnnnnnnnnnnnnnnnnnnnnnnnnnnnnnnnnnnnnnnnnnnnnnnnnnnnnnnnnnnnnnnnnnnnnnnnnnnnnnnnnnnnnnnnnnnnnnnnnnnnnnnnnnnnnnnnnnnnnnnnnnnnnnnnnnnnnnnnnnnnnnnnnnnnnnnnnnnnnnnnnnnnnnnnnnnnnnnnnnnnnnnnnnnnnnnnnnnnnnnnnnnnnnnnnnnnnnnnnnnnnnnnnnnnnnnnnnnnnnnnnnnnnnnnnnnnnnnnnnnnnnnnnnnnnnnnnnnnnnnnnnnnnnnnnnnnnnnnnnnnnnnnnnnnnnnnnnnnnnnnnnnnnnnnnnnnnnnnnnnnnnnnnnnnnnnnnnnnnnnnnnnnnnnnnnnnnnnnnnnnnnnnnnnnnnnnnnnnnnnnnnnnnnnnnnnnnnnnnnnnnnnnnnnnnnnnnnnnnnnnnnnnnnnnnnnnnnnnnnnnnnnnnnnnnnnnnnnnnnnnnnnnnnnnnnnnnnnnnnnnnnnnnnnnnnnnnnnnnnnnnnnnnnnnnnnnnnnnnnnnnnnnnnnnnnnnnnnnnnnnnnnnnnnnnnnnnnnnnnnnnnnnnnnnnnnnnnnnnnnnnnnnnnnnnnnnnnnnnnnnnnnnnnnnnnnnnnnnnnnnnnnnnnnnnnnnnnnnnnnnnnnnnnnnnnnnnnnnnnnnnnnnnnnnnnnnnnnnnnnnnnnnnnnnnnnnnnnnnnnnnnnnnnnnnnnnnnnnnnnnnnnnnnnnnnnnnnnnnnnnnnnnnnnnnnnnnnnnnnnnnnnnnnnnnnnnnnnnnnnnnnnnnnnnnnnnnnnnnnnnnnnnnnnnnnnnnnnnnnnnnnnnnnnnnnnnnnnnnnnnnnnnnnnnnnnnnnnnnnnnnnnnnnnnnnnnnnnnnnnnnnnnnnnnnnnnnnnnnnnnnnnnnnnnnnnnnnnnnnnnnnnnnnnnnnnnnnnnnnnnnnnnnnnnnnnnnnnnnnnnnnnnnnnnnnnnnnnnnnnnnnnnnnnnnnnnnnnnnnnnnnnnnnnnnnnnnnnnnnnnnnnnnnnnnnnnnnnnnnnnnnnnnnnnnnnnnnnnnnnnnnnnnnnnnnnnnnnnnnnnnnnnnnnnnnnnnnnnnnnnnnnnnnnnnnnnnnnnnnnnnnnnnnnnnnnnnnnnnnnnnnnnnnnnnnnnnnnnnnnnnnnnnnnnnnnnnnnnnnnnnnnnnnnnnnnnnnnnnnnnnnnnnnnnnnnnnnnnnnnnnnnnnnnnnnnnnnnnnnnnnnnnnnnnnnnnnnnnnnnnnnnnnnnnnnnnnnnnnnnnnnnnnnnnnnnnnnnnnnnnnnnnnnnnnnnnnnnnnnnnnnnnnnnnnnnnnnnnnnnnnnnnnnnnnnnnnnnnnnnnnnnnnnnnnnnnnnnnnnnnnnnnnnnnnnnnnnnnnnnnnnnnnnnnnnnnnnnnnnnnnnnnnnnnnnnnnnnnnnnnnnnnnnnnnnnnnnnnnnnnnnnnnnnnnnnnnnnnnnnnnnnnnnnnnnnnnnnnnnnnnnnnnnnnnnnnnnnnnnnnnnnnnnnnnnnnnnnnnnnnnnnnnnnnnnnnnnnnnnnnnnnnnnnnnnnnnnnnnnnnnnnnnnnnnnnnnnnnnnnnnnnnnnnnnnnnnnnnnnnnnnnnnnnnnnnnnnnnnnnnnnnnnnnnnnnnnnnnnnnnnnnnnnnnnnnnnnnnnnnnnnnnnnnnnnnnnnnnnnnnnnnnnnnnnnnnnnnnnnnnnnnnnnnnnnnnnnnnnnnnnnnnnnnnnnnnnnnnnnnnnnnnnnnnnnnnnnnnnnnnnnnnnnnnnnnnnnnnnnnnnnnnnnnnnnnnnnnnnnnnnnnnnnnnnnnnnnnnnnnnnnnnnnnnnnnnnnnnnnnnnnnnnnnnnnnnnnnnnnnnnnnnnnnnnnnnnnnnnnnnnnnnnnnnnnnnnnnnnnnnnnnnnnnnnnnnnnnnnnnnnnnnnnnnnnnnnnnnnnnnnnnnnnnnnnnnnnnnnnnnnnnnnnnnnnnnnnnnnnnnnnnnnnnnnnnnnnnnnnnnnnnnnnnnnnnnnnnnnnnnnnnnnnnnnnnnnnnnnnnnnnnnnnnnnnnnnnnnnnnnnnnnnnnnnnnnnnnnnnnnnnnnnnnnnnnnnnnnnnnnnnnnnnnnnnnnnnnnnnnnnnnnnnnnnnnnnnnnnnnnnnnnnnnnnnnnnnnnnnnnnnnnnnnnnnnnnnnnnnnnnnnnnnnnnnnnnnnnnnnnnnnnnnnnnnnnnnnnnnnnnnnnnnnnnnnnnnnnnnnnnnnnnnnnnnnnnnnnnnnnnnnnnnnnnnnnnnnnnnnnnnnnnnnnnnnnnnnnnnnnnnnnnnnnnnnnnnnnnnnnnnnnnnnnnnnnnnnnnnnnnnnnnnnnnnnnnnnnnnnnnnnnnnnnnnnnnnnnnnnnnnnnnnnnnnnnnnnnnnnnnnnnnnnnnnnnnnnnnnnnnnnnnnnnnnnnnnnnnnnnnnnnnnnnnnnnnnnnnnnnnnnnnnnnnnnnnnnnnnnnnnnnnnnnnnnnnnnnnnnnnnnnnnnnnnnnnnnnnnnnnnnnnnnnnnnnnnnnnnnnnnnnnnnnnnnnnnnnnnnnnnnnnnnnnnnnnnnnnnnnnnnnnnnnnnnnnnnnnnnnnnnnnnnnnnnnnnnnnnnnnnnnnnnnnnnnnnnnnnnnnnnnnnnnnnnnnnnnnnnnnnnnnnnnnnnnnnnnnnnnnnnnnnnnnnnnnnnnnnnnnnnnnnnnnnnnnnnnnnnnnnnnnnnnnnnnnnnnnnnnnnnnnnnnnnnnnnnnnnnnnnnnnnnnnnnnnnnnnnnnnnnnnnnnnnnnnnnnnnnnnnnnnnnnnnnnnnnnnnnnnnnnnnnnnnnnnnnnnnnnnnnnnnnnnnnnnnnnnnnnnnnnnnnnnnnnnnnnnnnnnnnnnnnnnnnnnnnnnnnnnnnnnnnnnnnnnnnnnnnnnnnnnnnnnnnnnnnnnnnnnnnnnnnnnnnnnnnnnnnnnnnnnnnnnnnnnnnnnnnnnnnnnnnnnnnnnnnnnnnnnnnnnnnnnnnnnnnnnnnnnnnnnnnnnnnnnnnnnnnnnnnnnnnnnnnnnnnnnnnnnnnnnnnnnnnnnnnnnnnnnnnnnnnnnnnnnnnnnnnnnnnnnnnnnnnnnnnnnnnnnnnnnnnnnnnnnnnnnnnnnnnnnnnnnnnnnnnnnnnnnnnnnnnnnnnnnnnnnnnnnnnnnnnnnnnnnnnnnnnnnnnnnnnnnnnnnnnnnnnnnnnnnnnnnnnnnnnnnnnnnnnnnnnnnnnnnnnnnnnnnnnnnnnnnnnnnnnnnnnnnnnnnnnnnnnnnnnnnnnnnnnnnnnnnnnnnnnnnnnnnnnnnnnnnnnnnnnnnnnnnnnnnnnnnnnnnnnnnnnnnnnnnnnnnnnnnnnnnnnnnnnnnnnnnnnnnnnnnnnnnnnnnnnnnnnnnnnnnnnnnnnnnnnnnnnnnnnnnnnnnnnnnnnnnnnnnnnnnnnnnnnnnnnnnnnnnnnnnnnnnnnnnnnnnnnnnnnnnnnnnnnnnnnnnnnnnnnnnnnnnnnnnnnnnnnnnnnnnnnnnnnnnnnnnnnnnnnnnnnnnnnnnnnnnnnnnnnnnnnnnnnnnnnnnnnnnnnnnnnnnnnnnnnnnnnnnnnnnnnnnnnnnnnnnnnnnnnnnnnnnnnnnnnnnnnnnnnnnnnnnnnnnnnnnnnnnnnnnnnnnnnnnnnnnnnnnnnnnnnnnnnnnnnnnnnnnnnnnnnnnnnnnnnnnnnnnnnnnnnnnnnnnnnnnnnnnnnnnnnnnnnnnnnnnnnnnnnnnnnnnnnnnnnnnnnnnnnnnnnnnnnnnnnnnnnnnnnnnnnnnnnnnnnnnnnnnnnnnnnnnnnnnnnnnnnnnnnnnnnnnnnnnnnnnnnnnnnnnnnnnnnnnnnnnnnnnnnnnnnnnnnnnnnnnnnnnnnnnnnnnnnnnnnnnnnnnnnnnnnnnnnnnnnnnnnnnnnnnnnnnnnnnnnnnnnnnnnnnnnnnnnnnnnnnnnnnnnnnnnnnnnnnnnnnnnnnnnnnnnnnnnnnnnnnnnnnnnnnnnnnnnnnnnnnnnnnnnnnnnnnnnnnnnnnnnnnnnnnnnnnnnnnnnnnnnnnnnnnnnnnnnnnnnnnnnnnnnnnnnnnnnnnnnnnnnnnnnnnnnnnnnnnnnnnnnnnnnnnnnnnnnnnnnnnnnnnnnnnnnnnnnnnnnnnnnnnnnnnnnnnnnnnnnnnnnnnnnnnnnnnnnnnnnnnnnnnnnnnnnnnnnnnnnnnnnnnnnnnnnnnnnnnnnnnnnnnnnnnnnnnnnnnnnnnnnnnnnnnnnnnnnnnnnnnnnnnnnnnnnnnnnnnnnnnnnnnnnnnnnnnnnnnnnnnnnnnnnnnnnnnnnnnnnnnnnnnnnnnnnnnnnnnnnnnnnnnnnnnnnnnnnnnnnnnnnnnnnnnnnnnnnnnnnnnnnnnnnnnnnnnnnnnnnnnnnnnnnnnnnnnnnnnnnnnnnnnnnnnnnnnnnnnnnnnnnnnnnnnnnnnnnnnnnnnnnnnnnnnnnnnnnnnnnnnnnnnnnnnnnnnnnnnnnnnnnnnnnnnnnnnnnnnnnnnnnnnnnnnnnnnnnnnnnnnnnnnnnnnnnnnnnnnnnnnnnnnnnnnnnnnnnnnnnnnnnnnnnnnnnnnnnnnnnnnnnnnnnnnnnnnnnnnnnnnnnnnnnnnnnnnnnnnnnnnnnnnnnnnnnnnnnnnnnnnnnnnnnnnnnnnnnnnnnnnnnnnnnnnnnnnnnnnnnnnnnnnnnnnnnnnnnnnnnnnnnnnnnnnnnnnnnnnnnnnnnnnnnnnnnnnnnnnnnnnnnnnnnnnnnnnnnnnnnnnnnnnnnnnnnnnnnnnnnnnnnnnnnnnnnnnnnnnnnnnnnnnnnnnnnnnnnnnnnnnnnnnnnnnnnnnnnnnnnnnnnnnnnnnnnnnnnnnnnnnnnnnnnnnnnnnnnnnnnnnnnnnnnnnnnnnnnnnnnnnnnnnnnnnnnnnnnnnnnnnnnnnnnnnnnnnnnnnnnnnnnnnnnnnnnnnnnnnnnnnnnnnnnnnnnnnnnnnnnnnnnnnnnnnnnnnnnnnnnnnnnnnnnnnnnnnnnnnnnnnnnnnnnnnnnnnnnnnnnnnnnnnnnnnnnnnnnnnnnnnnnnnnnnnnnnnnnnnnnnnnnnnnnnnnnnnnnnnnnnnnnnnnnnnnnnnnnnnnnnnnnnnnnnnnnnnnnnnnnnnnnnnnnnnnnnnnnnnnnnnnnnnnnnnnnnnnnnnnnnnnnnnnnnnnnnnnnnnnnnnnnnnnnnnnnnnnnnnnnnnnnnnnnnnnnnnnnnnnnnnnnnnnnnnnnnnnnnnnnnnnnnnnnnnnnnnnnnnnnnnnnnnnnnnnnnnnnnnnnnnnnnnnnnnnnnnnnnnnnnnnnnnnnnnnnnnnnnnnnnnnnnnnnnnnnnnnnnnnnnnnnnnnnnnnnnnnnnnnnnnnnnnnnnnnnnnnnnnnnnnnnnnnnnnnnnnnnnnnnnnnnnnnnnnnnnnnnnnnnnnnnnnnnnnnnnnnnnnnnnnnnnnnnnnnnnnnnnnnnnnnnnnnnnnnnnnnnnnnnnnnnnnnnnnnnnnnnnnnnnnnnnnnnnnnnnnnnnnnnnnnnnnnnnnnnnnnnnnnnnnnnnnnnnnnnnnnnnnnnnnnnnnnnnnnnnnnnnnnnnnnnnnnnnnnnnnnnnnnnnnnnnnnnnnnnnnnnnnnnnnnnnnnnnnnnnnnnnnnnnnnnnnnnnnnnnnnnnnnnnnnnnnnnnnnnnnnnnnnnnnnnnnnnnnnnnnnnnnnnnnnnnnnnnnnnnnnnnnnnnnnnnnnnnnnnnnnnnnnnnnnnnnnnnnnnnnnnnnnnnnnnnnnnnnnnnnnnnnnnnnnnnnnnnnnnnnnnnnnnnnnnnnnnnnnnnnnnnnnnnnnnnnnnnnnnnnnnnnnnnnnnnnnnnnnnnnnnnnnnnnnnnnnnnnnnnnnnnnnnnnnnnnnnnnnnnnnnnnnnnnnnnnnnnnnnnnnnnnnnnnnnnnnnnnnnnnnnnnnnnnnnnnnnnnnnnnnnnnnnnnnnnnnnnnnnnnnnnnnnnnnnnnnnnnnnnnnnnnnnnnnnnnnnnnnnnnnnnnnnnnnnnnnnnnnnnnnnnnnnnnnnnnnnnnnnnnnnnnnnnnnnnnnnnnnnnnnnnnnnnnnnnnnnnnnnnnnnnnnnnnnnnnnnnnnnnnnnnnnnnnnnnnnnnnnnnnnnnnnnnnnnnnnnnnnnnnnnnnnnnnnnnnnnnnnnnnnnnnnnnnnnnnnnnnnnnnnnnnnnnnnnnnnnnnnnnnnnnnnnnnnnnnnnnnnnnnnnnnnnnnnnnnnnnnnnnnnnnnnnnnnnnnnnnnnnnnnnnnnnnnnnnnnnnnnnnnnnnnnnnnnnnnnnnnnnnnnnnnnnnnnnnnnnnnnnnnnnnnnnnnnnnnnnnnnnnnnnnnnnnnnnnnnnnnnnnnnnnnnnnnnnnnnnnnnnnnnnnnnnnnnnnnnnnnnnnnnnnnnnnnnnnnnnnnnnnnnnnnnnnnnnnnnnnnnnnnnnnnnnnnnnnnnnnnnnnnnnnnnnnnnnnnnnnnnnnnnnnnnnnnnnnnnnnnnnnnnnnnnnnnnnnnnnnnnnnnnnnnnnnnnnnnnnnnnnnnnnnnnnnnnnnnnnnnnnnnnnnnnnnnnnnnnnnnnnnnnnnnnnnnnnnnnnnnnnnnnnnnnnnnnnnnnnnnnnnnnnnnnnnnnnnnnnnnnnnnnnnnnnnnnnnnnnnnnnnnnnnnnnnnnnnnnnnnnnnnnnnnnnnnnnnnnnnnnnnnnnnnnnnnnnnnnnnnnnnnnnnnnnnnnnnnnnnnnnnnnnnnnnnnnnnnnnnnnnnnnnnnnnnnnnnnnnnnnnnnnnnnnnnnnnnnnnnnnnnnnnnnnnnnnnnnnnnnnnnnnnnnnnnnnnnnnnnnnnnnnnnnnnnnnnnnnnnnnnnnnnnnnnnnnnnnnnnnnnnnnnnnnnnnnnnnnnnnnnnnnnnnnnnnnnnnnnnnnnnnnnnnnnnnnnnnnnnnnnnnnnnnnnnnnnnnnnnnnnnnnnnnnnnnnnnnnnnnnnnnnnnnnnnnnnnnnnnnnnnnnnnnnnnnnnnnnnnnnnnnnnnnnnnnnnnnnnnnnnnnnnnnnnnnnnnnnnnnnnnnnnnnnnnnnnnnnnnnnnnnnnnnnnnnnnnnnnnnnnnnnnnnnnnnnnnnnnnnnnnnnnnnnnnnnnnnnnnnnnnnnnnnnnnnnnnnnnnnnnnnnnnnnnnnnnnnnnnnnnnnnnnnnnnnnnnnnnnnnnnnnnnnnnnnnnnnnnnnnnnnnnnnnnnnnnnnnnnnnnnnnnnnnnnnnnnnnnnnnnnnnnnnnnnnnnnnnnnnnnnnnnnnnnnnnnnnnnnnnnnnnnnnnnnnnnnnnnnnnnnnnnnnnnnnnnnnnnnnnnnnnnnnnnnnnnnnnnnnnnnnnnnnnnnnnnnnnnnnnnnnnnnnnnnnnnnnnnnnnnnnnnnnnnnnnnnnnnnnnnnnnnnnnnnnnnnnnnnnnnnnnnnnnnnnnnnnnnnnnnnnnnnnnnnnnnnnnnnnnnnnnnnnnnnnnnnnnnnnnnnnnnnnnnnnnnnnnnnnnnnnnnnnnnnnnnnnnnnnnnnnnnnnnnnnnnnnnnnnnnnnnnnnnnnnnnnnnnnnnnnnnnnnnnnnnnnnnnnnnnnnnnnnnnnnnnnnnnnnnnnnnnnnnnnnnnnnnnnnnnnnnnnnnnnnnnnnnnnnnnnnnnnnnnnnnnnnnnnnnnnnnnnnnnnnnnnnnnnnnnnnnnnnnnnnnnnnnnnnnnnnnnnnnnnnnnnnnnnnnnnnnnnnnnnnnnnnnnnnnnnnnnnnnnnnnnnnnnnnnnnnnnnnnnnnnnnnnnnnnnnnnnnnnnnnnnnnnnnnnnnnnnnnnnnnnnnnnnnnnnnnnnnnnnnnnnnnnnnnnnnnnnnnnnnnnnnnnnnnnnnnnnnnnnnnnnnnnnnnnnnnnnnnnnnnnnnnnnnnnnnnnnnnnnnnnnnnnnnnnnnnnnnnnnnnnnnnnnnnnnnnnnnnnnnnnnnnnnnnnnnnnnnnnnnnnnnnnnnnnnnnnnnnnnnnnnnnnnnnnnnnnnnnnnnnnnnnnnnnnnnnnnnnnnnnnnnnnnnnnnnnnnnnnnnnnnnnnnnnnnnnnnnnnnnnnnnnnnnnnnnnnnnnnnnnnnnnnnnnnnnnnnnnnnnnnnnnnnnnnnnnnnnnnnnnnnnnnnnnnnnnnnnnnnnnnnnnnnnnnnnnnnnnnnnnnnnnnnnnnnnnnnnnnnnnnnnnnnnnnnnnnnnnnnnnnnnnnnnnnnnnnnnnnnnnnnnnnnnnnnnnnnnnnnnnnnnnnnnnnnnnnnnnnnnnnnnnnnnnnnnnnnnnnnnnnnnnnnnnnnnnnnnnnnnnnnnnnnnnnnnnnnnnnnnnnnnnnnnnnnnnnnnnnnnnnnnnnnnnnnnnnnnnnnnnnnnnnnnnnnnnnnnnnnnnnnnnnnnnnnnnnnnnnnnnnnnnnnnnnnnnnnnnnnnnnnnnnnnnnnnnnnnnnnnnnnnnnnnnnnnnnnnnnnnnnnnnnnnnnnnnnnnnnnnnnnnnnnnnnnnnnnnnnnnnnnnnnnnnnnnnnnnnnnnnnnnnnnnnnnnnnnnnnnnnnnnnnnnnnnnnnnnnnnnnnnnnnnnnnnnnnnnnnnnnnnnnnnnnnnnnnnnnnnnnnnnnnnnnnnnnnnnnnnnnnnnnnnnnnnnnnnnnnnnnnnnnnnnnnnnnnnnnnnnnnnnnnnnnnnnnnnnnnnnnnnnnnnnnnnnnnnnnnnnnnnnnnnnnnnnnnnnnnnnnnnnnnnnnnnnnnnnnnnnnnnnnnnnnnnnnnnnnnnnnnnnnnnnnnnnnnnnnnnnnnnnnnnnnnnnnnnnnnnnnnnnnnnnnnnnnnnnnnnnnnnnnnnnnnnnnnnnnnnnnnnnnnnnnnnnnnnnnnnnnnnnnnnnnnnnnnnnnnnnnnnnnnnnnnnnnnnnnnnnnnnnnnnnnnnnnnnnnnnnnnnnnnnnnnnnnnnnnnnnnnnnnnnnnnnnnnnnnnnnnnnnnnnnnnnnnnnnnnnnnnnnnnnnnnnnnnnnnnnnnnnnnnnnnnnnnnnnnnnnnnnnnnnnnnnnnnnnnnnnnnnnnnnnnnnnnnnnnnnnnnnnnnnnnnnnnnnnnnnnnnnnnnnnnnnnnnnnnnnnnnnnnnnnnnnnnnnnnnnnnnnnnnnnnnnnnnnnnnnnnnnnnnnnnnnnnnnnnnnnnnnnnnnnnnnnnnnnnnnnnnnnnnnnnnnnnnnnnnnnnnnnnnnnnnnnnnnnnnnnnnnnnnnnnnnnnnnnnnnnnnnnnnnnnnnnnnnnnnnnnnnnnnnnnnnnnnnnnnnnnnnnnnnnnnnnnnnnnnnnnnnnnnnnnnnnnnnnnnnnnnnnnnnnnnnnnnnnnnnnnnnnnnnnnnnnnnnnnnnnnnnnnnnnnnnnnnnnnnnnnnnnnnnnnnnnnnnnnnnnnnnnnnnnnnnnnnnnnnnnnnnnnnnnnnnnnnnnnnnnnnnnnnnnnnnnnnnnnnnnnnnnnnnnnnnnnnnnnnnnnnnnnnnnnnnnnnnnnnnnnnnnnnnnnnnnnnnnnnnnnnnnnnnnnnnnnnnnnnnnnnnnnnnnnnnnnnnnnnnnnnnnnnnnnnnnnnnnnnnnnnnnnnnnnnnnnnnnnnnnnnnnnnnnnnnnnnnnnnnnnnnnnnnnnnnnnnnnnnnnnnnnnnnnnnnnnnnnnnnnnnnnnnnnnnnnnnnnnnnnnnnnnnnnnnnnnnnnnnnnnnnnnnnnnnnnnnnnnnnnnnnnnnnnnnnnnnnnnnnnnnnnnnnnnnnnnnnnnnnnnnnnnnnnnnnnnnnnnnnnnnnnnnnnnnnnnnnnnnnnnnnnnnnnnnnnnnnnnnnnnnnnnnnnnnnnnnnnnnnnnnnnnnnnnnnnnnnnnnnnnnnnnnnnnnnnnnnnnnnnnnnnnnnnnnnnnnnnnnnnnnnnnnnnnnnnnnnnnnnnnnnnnnnnnnnnnnnnnnnnnnnnnnnnnnnnnnnnnnnnnnnnnnnnnnnnnnnnnnnnnnnnnnnnnnnnnnnnnnnnnnnnnnnnnnnnnnnnnnnnnnnnnnnnnnnnnnnnnnnnnnnnnnnnnnnnnnnnnnnnnnnnnnnnnnnnnnnnnnnnnnnnnnnnnnnnnnnnnnnnnnnnnnnnnnnnnnnnnnnnnnnnnnnnnnnnnnnnnnnnnnnnnnnnnnnnnnnnnnnnnnnnnnnnnnnnnnnnnnnnnnnnnnnnnnnnnnnnnnnnnnnnnnnnnnnnnnnnnnnnnnnnnnnnnnnnnnnnnnnnnnnnnnnnnnnnnnnnnnnnnnnnnnnnnnnnnnnnnnnnnnnnnnnnnnnnnnnnnnnnnnnnnnnnnnnnnnnnnnnnnnnnnnnnnnnnnnnnnnnnnnnnnnnnnnnnnnnnnnnnnnnnnnnnnnnnnnnnnnnnnnnnnnnnnnnnnnnnnnnnnnnnnnnnnnnnnnnnnnnnnnnnnnnnnnnnnnnnnnnnnnnnnnnnnnnnnnnnnnnnnnnnnnnnnnnnnnnnnnnnnnnnnnnnnnnnnnnnnnnnnnnnnnnnnnnnnnnnnnnnnnnnnnnnnnnnnnnnnnnnnnnnnnnnnnnnnnnnnnnnnnnnnnnnnnnnnnnnnnnnnnnnnnnnnnnnnnnnnnnnnnnnnnnnnnnnnnnnnnnnnnnnnnnnnnnnnnnnnnnnnnnnnnnnnnnnnnnnnnnnnnnnnnnnnnnnnnnnnnnnnnnnnnnnnnnnnnnnnnnnnnnnnnnnnnnnnnnnnnnnnnnnnnnnnnnnnnnnnnnnnnnnnnnnnnnnnnnnnnnnnnnnnnnnnnnnnnnnnnnnnnnnnnnnnnnnnnnnnnnnnnnnnnnnnnnnnnnnnnnnnnnnnnnnnnnnnnnnnnnnnnnnnnnnnnnnnnnnnnnnnnnnnnnnnnnnnnnnnnnnnnnnnnnnnnnnnnnnnnnnnnnnnnnnnnnnnnnnnnnnnnnnnnnnnnnnnnnnnnnnnnnnnnnnnnnnnnnnnnnnnnnnnnnnnnnnnnnnnnnnnnnnnnnnnnnnnnnnnnnnnnnnnnnnnnnnnnnnnnnnnnnnnnnnnnnnnnnnnnnnnnnnnnnnnnnnnnnnnnnnnnnnnnnnnnnnnnnnnnnnnnnnnnnnnnnnnnnnnnnnnnnnnnnnnnnnnnnnnnnnnnnnnnnnnnnnnnnnnnnnnnnnnnnnnnnnnnnnnnnnnnnnnnnnnnnnnnnnnnnnnnnnnnnnnnnnnnnnnnnnnnnnnnnnnnnnnnnnnnnnnnnnnnnnnnnnnnnnnnnnnnnnnnnnnnnnnnnnnnnnnnnnnnnnnnnnnnnnnnnnnnnnnnnnnnnnnnnnnnnnnnnnnnnnnnnnnnnnnnnnnnnnnnnnnnnnnnnnnnnnnnnnnnnnnnnnnnnnnnnnnnnnnnnnnnnnnnnnnnnnnnnnnnnnnnnnnnnnnnnnnnnnnnnnnnnnnnnnnnnnnnnnnnnnnnnnnnnnnnnnnnnnnnnnnnnnnnnnnnnnnnnnnnnnnnnnnnnnnnnnnnnnnnnnnnnnnnnnnnnnnnnnnnnnnnnnnnnnnnnnnnnnnnnnnnnnnnnnnnnnnnnnnnnnnnnnnnnnnnnnnnnnnnnnnnnnnnnnnnnnnnnnnnnnnnnnnnnnnnnnnnnnnnnnnnnnnnnnnnnnnnnnnnnnnnnnnnnnnnnnnnnnnnnnnnnnnnnnnnnnnnnnnnnnnnnnnnnnnnnnnnnnnnnnnnnnnnnnnnnnnnnnnnnnnnnnnnnnnnnnnnnnnnnnnnnnnnnnnnnnnnnnnnnnnnnnnnnnnnnnnnnnnnnnnnnnnnnnnnnnnnnnnnnnnnnnnnnnnnnnnnnnnnnnnnnnnnnnnnnnnnnnnnnnnnnnnnnnnnnnnnnnnnnntggcttggttgaaaagaaatagaccgcggatcacagtatcagcaggatcatcgggatatttggaaggtggaaaggtgaaatggtgaaaaggagcccccaaaccagggcggttcagcgaccgcctgtactgtaccggcgcttgcatagcgcagtttgggggatagccgcccgaggagggggtggcaaagtccgtttgccacagagaccggaggtctcttcctaacaggcaactccgttgcctctgccgaacggacttcggcaacccttatattacaccaatccgcgacaatctgcgccttttatccgcgtatatctgcgtgaaccgtggaacccgggatccagtcttttacaggaaagtttgaagtccgagccggcttcaggactggcataagcatgaaacccatattgccggctcgaactctaaacacagccagcatggagttcaagagccttttcagactgaaaaatgccaccatacaagttggctcttggacttcatgcgtaacatattgctggctcgaactctaaacacaaccagaatatatttcatccgcgaggcaaataatgcttgacatagaatctaaaccacacaaaaatagatttgagagggtaaataaagaaaggagcaggaaagatgagcaagagcttagtttttgtgctggcgttcttatgcctggcggctgcgtgcctggggtcggaagcggccgcgcctgaccctccggagccactccgcgcggtggaactgacgcctccgccttcaccggtaagagcgttgccagggcagaagtccgtgcctccctggaacttcagcgtcaatccaaacccgatcataaacaactattacgactacatgatcggcggctacaacaacctgcctctgaacctcgtccccgagagccagggcggaggctatttcctcacctggacggggcgcaacagccccaccagcgaccgcaagtcctattacggctatctgtactcatccggaatgccaatcttcgttaaccagatcgttacccagggagaaggcgagcacggcatgccggcattggtggtggatcccgttgatggaaatcctttctacgcctggacccagaatgtggacacggacccggtgtccgagattgtgctgacctccgatgccttcatagccggaattgccggattgttcaacaccacccagatcgtgatcgacaaccccgtcaccctcaccgcgccggacgggacggagaccacaaacaacgttttctactggcccagcctggccatcggcccctcccctctggcgggcaagcgcaggctctatctgctgggacggcaaaactgcaacgtctatctggcaatggctgatttctcccgcgatgatgtcgaaaatggaatccccctcaactggcagtactccagcgttccgcaactcaacacctgggaactgaatgccgtgccaaacaaaacctatctggccctggaaactgactccggcgggaatgtcatcctggccggatatcacaacagctactcgattgagaatgatatcatcgtcttcatctgcggcaacttcggacagggggaatggacgttccacagcttcaacagcaggatgcccacctggaaccccacctatcccggcagcaacggcggcttctttatagatgatgaggggcaaccctttcaggatcaagacctgcactggaaactgttgaactccggacatctgaacgccaccctggatagcggtggcaggctgcatatcgtggggatttgggccttggccggcggggacggcgtatttttccctcatttccagttcgtgaaagaagctgtttacgacccgacttggaataatttcgagatccgcgacatctttccccaaaaaaattgtgacgaccttttcaatgcctgtttcaccccctgggacatgctgccgccctacggcgaggttgacgaatggatctacgatgaggaatatggttactatccatacacgttcactgactggcccttcccccactgggaccaggcagcacacgaaaacaccatgatgttccactataacaacgtcaagatcacccgcgccaacgactatggccagatggctgtggtctggcaggattccaaacgcgcctttgactggtgcgtgtatcattatcccggctatgaggcctgggaacacggcacggacatctatatcgcctatacaaactatggcggctcggagtggcaggacccgatcgtgctcaacaatgtcgatactcccgaactggcgggcatcaagccgatgtgggtgtatccggctgaccggatgatatacactggcttcaaccagtacggaattaaagagggaaaactgggcctgatgttttacgatgacttcacctggggctcgaattctctcccgccaccctaccaccccgatcctgacggcggccgggtgatgttcatggaactgcatatcggatacctggacgccaacgatcccagccaggcgccagctccggccatcctggcgcagaattggcccaaccccttcaatcctaacaccaacatcagttttgaactgcctcagcccggccctgcccggctggaaatcttcgacctccgcggaaggctggtaagcaccctactggacaaggagatgggagccggaaaacatagcctgaactgggacggcaccgactccaacggcgcccaactggcaagcggagtctatatctaccgcctcagcacgggaaggacgagcgccagccgcaaaatgatattgctgaagtgacgggcatccgcccttccaagtccgatctttataccgagccgccgcgtgtattgcgcggcggtttgctttccgcagaccaagtattagcagcgggaaaactgcaatgaaatagccgctggtggggctccgtaaaatgggagtggaagccgccgcatggaacaccttgaaagtaacaagagaccgccccaaattgacctttcctgacctaataacccctcaaagcaaatttcttgacaatgatctttggctaaaatataaggttcccatcgagcaaaaggagcatgttatgtacaatcttctttgtgataattgggtaaacgtggtctatctttcgggcaaaccagatagaatatctttagttcaaactcttaaagacgcacactgtctgcaactggcatacagcaatcctatggaccggttcgctgtcttcagattcctgcttgctcttggctactggtgtttcgccaacaccaacgtggagcctgaacctgataagccgcttccggtctcctggataccctggctggaagaaaacaaggagtatttcgagctttttggtgatggaaagagatttttccaagccgatcccagttccaggatcagagccattaccgaccttattcatgagataccaacagctcacaacctatgccatttcaaacatgtcaccgactatatcgatgggctctgcgaagcttgctgcatcaagggactgctgagattacctgtctttaccactgtcggtggcagagggataggcgctggaatcaacaacactcctccattttacctgctctggcatgcaaatgatctcgctggcatgctggctcaaaattggcaaccctgggataatatggggattccggcatggttgggttcttttcaaaaagaaagcagggaagtaggcttacttgctggaatgacctggctgccgcgcaaggtgtatctgcatgatcctgtcccaggtcaggcagcatgttgttcctgcggcttaccctccaaagctctcgtctattcctgcagcataaaacctgaaccagtgccggaaggccttaaatggaaagaccctcatggtgtttacaccgatcagggaaaaagtctccagtccaaaatcaaactgatgtccaatgatagatacactttcgcggaccgggattggtatagcccgttgttcagctatttgcacgcggaaggaaactccagacaaggaaaactatggttggttggatttgccagcgataaagcaaaaagcatagacatctgggacaagatcatcgagcttgagggaactgatacaaatgatgagctactggctcaattggcaaacagggctactgcccttaatgccatgcgcaagaagcctctcagaggtgatttcaaaaagtcagtgggcactccccagattgctgacattatcccccacgccgaaagcagaattgccatcaatgcgggtaaaatgactgagaacaggggctattcctggcaggatgccgatactgaatacggagaactgctcaccaaggttgcatgctctttggagccggctcaaacagtggacgccaggctcaagagaggtaaattcatttcccgcaagccctggccagttataccagaatccaaaacaaaacccgcagaggaggaccagaatgaatagaggaaccgttgacttcattgcaagcctggagaacctcaaagaaggcgatttgggcattcttagaaaactcaggggagcccggcttgatgaaaagcttcccggatttgacctgttttccgccctatggtggcctttgcggcaaaagaatcaacgcgctcccaagcgtgaagtggcttggttgatcgccaaactttttgctgaattccgctttgaacagcgcgagggagccacattgcccattcttatgggaggcatctgccggaagttggaacccaaaaaggaattaccccgggtattggcacgctttgatcaactcgcatcgcttgacattatgcagatggaagagccgctgtcggtcatcatgggtattttgcgcaagcaccagcaggtctgcctggactgggtagggcttactgatgttctgtcattttgggagcaggaacctgtcaaaagagaatggtcggattcatttattaaagcatacaagatcaacaaggaggattcagatgttgattgaaattcatatgattcagaatcacagtccggcaaatcttaaccgggacgacttgggcgcccccaagacctgttatttcggtggagtattacgttctcgcatctccagccagtgcatcaagcgcagcatccgttttgccccggaattcgcggaccttagaggaggtatccgaacaaggcgtctggcagagaaactcgaggaaatgctggaaaacaaagataagaagctggttgccaagtttcttgaagcctgcggaatcaaaaccaaatcttccaagaaagctgcaaaaaagtccgaaaagatacccgcggaagccgatgaagatcaggatgagcagcaggcggctgatacatctgacatgctggtttttaccacttatgatgccctgcgccaaatggcaaagctgctttccgactccaaactaagtgaaagcgaaaaactgctgcagttcaaagatctgctcacaaactgcgtccattctccggatatagcactttgcggcaggatgctggagaccaaagagcttaaaaacactggcgttgaaggcgccctacaggttgcacatgcgatctccacccacattgccagacctgagatagactattttgtggcggccgatgatgttcccggtgaagacgccggagcgggtcatattggcgaatccatgtttgcctcagcctgtttctacaaatacttctccattgattgggaacagttggtcaagaacctgaaaggggacacgaatctggcagcccacaccgtgggtgcctttctcctcgccgctgccaaaaccaaccccagtggcaaacagaacagcttcgccgctcataactatcccgatggcatccttgttgagttcaagaattcccctattagctacgccaacgcattcgtcaggccagtttccgtggtcaaggaatcggacctggtggaacaaagcatcggccagctttccaactacgtgaacgacatcaggcttggctattatgatgagcaatccccagttatcagcttctggttttctccaaacaatcgctattcccttggcaatgagcattccaaactggcttccagaaacattggcaacctcaatgagcttgtaggcgctgtgttggattatattggcggcttcaagtgggaagaagttcagaaaagcaaggcttatgttggcggctgacatgagtgcgccacccaacaccttattcttgcgcttggagggggctttgcagtcttggggcagcaacgaggctaagtttgctttgcgcaggactaccgacgctcccacaaaatcaggtgtcctggggctgctttgcgcggccatgggaattgggcgcgcggaggctgctgattcatggctcccaaaactcgccaacctgcgcatgggcgtgcggatagaccgccccggcatacgctggtgggacttccatactgttggagcgggacaaagaatgcgcatggcagagctgaaggcacccaaaaaaccttccatggttggagctgccctggctgataccctgacaccaagcaaagtaaaaaccagggcagagaccttgctctcacgccgcgaatatcttgccgacgccagttttctggtcgccttgcagggtgagccggaacttgtggaaaagctctccgccgctctggccaagccggtctgggcaatttatctggggcgcaaatcctgtcccccttcacgtcccgtgggcgagcatgctccgggcttttataacactttggaggaggcgctgtccgcggttcccctgcaaaagcgctggcacaatgaacccctgccgcaaatactgccttgcgtcatggactggatccccagccaggacggagaacatgcgcctgatgacgcggagattcattacgatctgccggtttcttttcagccgccccgccatttgccgcgcttcgtgatcaggcgtgagctggttgtgggagaggatgtgcaagtgagcagggaaaccggaaccagcgtttggaggcccaaaggaacccgggcggattataacaattccgagtataagaaggtcagggcggagcggcttgtgatggaccatgccgcgtgcatggtatgcaaagctcccgccacgactgttcaacacgtgaattaccgcagggcgggaggcaaggaaataccggaagacctgcgggcgctgtgccgcctctgccacgacgcctgcaccatgctggaatacggttccggcatgaccaccgaccgcatcgacccctgcgaccccatatggcgggagcgaatactggcaaagcgcaaagatatagtcgagttccgttcgcgcgggcagcgtttccgcaaaatgaagccagaggaggaaaacggatgatctacttgtccaagctattgatcgatactggaggcaatccagaccgtccccgccccggcagaaagtggctggacaatatctataacgtccaccgccgcctttccatggcgttcccttcaggtttgcgccgggagcaggatccgcatttcctgaagcccttttcgccaaacgacttccaaaaaactcccttccttttccgggtcgataacaacatcgacggaaacgataaaagggcgattattatcgtccagtccgttcttgagccggattgggattattgcttccaaaacgcgcttgatttcctggcagcgccaccggaaacaaaggagtataatccagagtttcaagcgggacaactgctccggttcaggctgcgggtaaacgccagcgtacgccgtcatattcctgagaaggtgcaacaggacggtcaaaccatagaaactggcaacatcctgcacaaaagggtttctctcacctgggatccctcttccaccccggatcaggcccttgccgactggctggctgccaaaagcccaaagctgggcttcacccttcagcgctgtgagcttcttcaactgggttgggtttatggctccaagcctgaacctaaaaatgtcaaagcaaaggaacagggacagggctactggcgtgaacacacatacaatcctctgcgcttccgttcggctctactggagggaattctcaaagtggatgacccgaaactgttcctggaaacgcttagaagcggcattggaaaagcgaaaagcttcggctttggcctgctgtccgttctgccaatcaggaatgatgaataaagacctgcactctatcccccggatcagagatcggcttagctatctctatgtggagcatgccaaaattgatcagaacgggcaagccatcgccattcacgatgccctgggagaaaccccggttccttgtgccggcttggctatgctgatgctgggaccgggcataaccatcacccatgcggcaatactttcactggctgcctgtggctgtctggtagcctgggtgggggaacatggcgtcaggttctatgccgcaggcacaggtacaacccgtagcgccgtcaatcttatgaaacaggcaaagtactgggcagacccggttttgcatttacgggttgtgcgctccatgtatcagttgaggttccaggatgagctttctcctgatttaactttgaaccagatcaggggcaaggaaggtgcccgggtgcgcgatacatatttccaactctcccaaaagtatggtgtgcccatgcagggcagaaactatcaaagagacaactggaataaagcggatcccataaaccgggcattatctgtggcaaactcctgcctctacggcatatcgcacgctgccattgttgctgcaggattctctcccggattgggctttgtccacactggcaagcaactgtcatttgtctatgatatcgcggatctatacaaaatggaaatggctgctcccgccgcattccgggcgaccgctgaagggatcggcgaactcgaccgcagagtcaggcttgcctgccgtgatgaattccacaggcagaatctactcaaacgcattgtcgcggatattagttctctcttcggtgatattatgccagaggatagcccggatgactgttttgccgaagaaccagccttgcctggaggactctggtctccagatggagaagtttccccaggcggcatatcttacgggcaggatgatctgccaaaggaagattgatggtggttttagtattggaaaatgtgccaagctccctgaggggtaagatcacacgttggctgctggaagtaaaagccggggtgtttgtgggtaaagtctcagcaatggttagagataaactgtgggataaggttagaagcaattgcagcggtggaacttgcctgatgatctggagtagtcagaccgagcaagggtttgatatcgaattctggggtgccgcatcaagagtcgttacggaatgggagggtatcaaacttatgaccaagcatccttaaactaaggcttgaaggtgttcaatgacctcttagacctctattgatcaagtgtattccccatgcatgtgggggtgaaccgtagatggcacaagtgcaagcgccgcaaccacagtattccccatgcatgtgggggtgaaccgtgatggcgtaagcaatgtgccagaagttaatagtattccccatgcatgtgggggtgaaccggaattgccattgatgcggcaaataatgatcttgtattccccatgcatgtgggggtgaaccgggagagtagctctcttcggaaaaaacagcgaagtattccccatgcatgtgggggtgaaccgagtcacgctgttattgcgtataggcagggtgggtattccccatgcatgtgggggtgaaccggtcaaacgcggtttcaaggaggctgagtatgtgtattccccatgcatgtgggggtgaaccgggcggctggagccattgagccataaggagatagtattccccatgcatgtgggggtgaaccggcatccaatatctattggggcgtttcaggatagtattccccatgcatgtgggggtgaaccggttacctcttaaggtttaatgagattgtggcgtattccccatgcatgtgggggtgaaccgaaatgagagatgttaaacaggagaatacataagtattccccatgcatgtgggggtgaaccgcggtttatagaccgatgcaagccgatattagggtattccccatgcatgtgggggtgaaccgaggttcccgccataactgcccaacaccagtacgtattccccatgcatgtgg
